United States Patent Application Publication US 2026/0137736 A1 - sequence listing, part 2

SEQ ID NO: 49 - DNA, 2096256 bp, synthetic construct
  misc_feature 1..2096256: note = Based on Lactobacillus reuteri
  source 1..2096256: mol_type = other DNA
ggctaaatactccctagtgaccgatagtgaaccagtaccgtgagggaaaggtgaaaagcaccccggaaggggagtgaaatagttcctgaaaccatgtgcctacaagctgtcggagcccgttaatgggtgacggcgtgcctcttgcagaatgaaccggcgagttacgattgcatgcaaggttaaggtggaaaaaccggagccgtagcgaaagcgagtcttaaatgggcgtaaggagtatgtagttgtagacccgaaaccaggtgacctacccatgtccaggttgaaggtgcggtaaagcgcactggaggaccgaacccgtgtcagttgaaaatggctgggatgaggtgtgggtagcggtgaaattccaaacgaacttggagatagctggttctctccgaaatctctttagggggagccttgaggtaaagaatcgtggaggtagagctactgtttggacaaggggcccgtcatgggttaccaacttcagataaactccgaatgccattgatttatactcaggagtcagacgatgagtgataagatccactgtcgaaaggggaacagcccagatcaccagttaaggtccctaaatatatgctaagtggaaaaggatgtggagttgcatagacaactaggatgttggcttagaagcagccaccatttaaagagtgcgtaatagctcactagtcgagtgatcctgcgccgaaaatgtaccggggctaagcatattaccgaaactgtggatgtgcactatgtgcacgtgataggagagcgttctaagggcggcgaagtcagaccgtgaggactggtggagcgcttagaagtgagaatgccggtatgagtagcgaaagacaggtgagaatcctgtccaccgaatgactaaggtttcctggggaaggctcgtcctcccagggtaagtcgggacctaagccgaggccgagaggcgtaggcgatggataacaggttgagattcctgtaccagttaactgcgtttgacgatggagggacgcaggaggctaagcaaaccgtacgactggaagagtacggccaagcagtaagtcaggatgtgagtcaaatgtttacatccgtgttgacaagctgtgatggggagcgaaattaaagtagcgaagttgccgatgtcacactgccgagaaaagcttctaaggagtagttaactgcccgtaccgcaaaccgacacaggtagtcgaggagagaatcctaaggtgagcgagagaactctcgttaaggaactcggcaaaatgaccccgtaacttcgggagaaggggtgctggccgcaaggccagccgcagtgaataggcccaggcgactgtttatcaaaaacacaggtttctgcaaaatcgtaagatgaagtataggggctgacgcctgcccggtgctggaaggttaaaaggatgggttagcttcggcgaagctcagaattgaagccccagtaaacggcggccgtaactataacggtcctaaggtagcgaaattccttgtcgggtaagttccgacccgcacgaaaggcgtaacgatctgggcgctgtctcaacgagagactcggtgaaattgaaatccctgtgaagatgcagggtacccgcgacaggacggaaagaccccatggagctttactgtagcttgatattgagtgtttgtactgcttgtacaggataggtaggagccgtagaagtcgggacgctagtttcgacagaggcgctggtgggatactacccttgcaatatgaccactctaacccgcagcactgaacgtgctgggagacagtgtcaggtgggcagtttgactggggcggtcgcctcctaaaaggtaacggaggcgcccaaaggttcgctcagtatggttggaaatcatgcgcagagtgtaaaggcacaagcgagcttgactgcgagacagacaggtcgagcagggacgaaagtcgggcttagtgatccggtggttccgtgtggaagggccatcgctcaacggataaaagctaccctggggataacaggcttatctcccccaagagtccacatcgacggggaggtttggcacctcgatgtcggctcatcgcatcctggggctgtagtcggtcccaagggttgggctgttcgcccattaaagcggtacgcgagctgggttcagaacgtcgtgagacagttcggtccctatccgtcgcgggcgtaggaaatttgagaggacctgtccttagtacgagaggaccgggatggacataccgctggtgtaccagttgttccgccaggagcaccgctgggtagctatgtatggacgagataaacgctgaaagcatctaagtgtgaaactcgcctcgagatgagatttcccatttccttcgggaaagtaagacccctcagagatgatgaggtagataggatggaagtggaagtgccgtgaggcatggagcggaccattactaatcggtcgaggacttaaccaaggagcggtaaggtttattggaagagaatagataggatttagttttgagagcacaagctctcgtccgaagggacaaagagtgtggtgatgatggcttgaaggatacacctgtacccatgccgaacacagaagttaagcttcaacacgccgaaagtagttgggggatcgctccctgcaaggataggacgttgccgcgcagtagtaaaagggtgtgtatcgttttaacggtgcatgtcctttttttagtgcgcccggcatgggtattagctaggtggtgaaagtccgctatgggccgtagtagtcggaaccatgagctgaggacaagggtgtccaccgtgaggtggaatctgaaagaagtctaagggcaagcagtcaataacagtacggattgaaaaaattgggatcatgagctaccgaaaatgataattcatgatcccgttttatttatggcattctgcttgaatttcttttgaccatggcaaataagcctcaagtcctgcgtccttgcggtttggtaagtgatcaaaaagatacttaaagtatttgtagatatttaaatggttctggtttgcagttgccaccaaagtatagaaaatggcatttgcctgagctccagcagagcttttcgcaaataagctattctttcgaataagagttgatggacgaatcgcttgttcaaccggattattcgttaacggcactcgaccatcttcaaatatttgatatactcgctttcttagcttcaaagcattattaatggcagctttcaaccgtccttgaggaaaactgatattttctaaataagtatataacttatccatcaaaggcttcacgtgcaaccgacgttgcactagtttttccttatgattggaatatgttaattgtttctcttcatgaaagatcggtcgcattagctgtaaaactcggtatgctttggagttcttcaattgctccttattcaataaacatgtaatgtgataaaattcacgtcgaatatgaactaaacatgacccaaattttgcctggggatataatcgatcactatatccaccataaccgtcacacgtaataattccacgatattgatgaccgataatttgaccaatggttttacccgcgcgggtattatagtaatgaaacatgataatttgatgcttactgaattcttttgttgatcgcgttacccaaaagtagccagtttcattaggctcatcaattaccttgaatggagtttcatccatatgaattaccgattcttttctgattaattcctgtaaataatcatataacagttcaaggtaggtttgactaaccttaatgatgttagtcgccaataatcgagcatcaactcgtaagccgacggcttgccaaaacttaatttgacgatgaaacggtaaagcaagattaaacttcaactctgctactttagctaaaatagtactcgaaaagtaactatggggtaaaagactctgtggcatcttactactgacaagtacatcgctaccattagaattaatacactcattacatttataagtttcttgaatcaaattcacacaatataattcagctggttttaaccgtgcttctctactatatacatgttgacccacttttttcattagttgatgacagtgtgggcagttagtatcttttaatggaataacttcttcaacctgtggtaaaccatctaaaaaagtggtccgctgaccagatcgttttgctttccggtgacgcaccacttgctttattttttttcagtcacttccgtgactgaaatatcaggatcttgaagttgatccatttcttgctcactaaataaggattgttgtccatcaacgacgggctccattacttcagtttttttcccaaatatttggttcttttgaagtttgataatagctgttaattgagcaatcttttcattggccatagctaattgttgtttaagttctttgatttgttcttccgctgtttgcttcatggtacgtcacctcctttgaattattctttggtaattatatcaaagaattcttcttttaaatagaggtaactcaataaaaacttcctggtcgaacagcttgaattttacgaattggtaatgggttcagtccttgcaataaccagtcgagctgttgagcagataattctttggcttcattactgtttctcggccaactaaggtggccattttcaaaccgtttatagagcataataaagccctcgccatcccaaaacaatcctttaaagcgatcattacgtccgccgcaaaataagaaaagcgaattaaattctaatccatagttctcagcgattaccattgcgagcccatcaataccttttcgcatgtctgtttttccacagactagatagatataatctgggtcatgccaattaacgagcataacgaataaccattttaacgatatccgaagctaaaacagaattagtccccttgaaaatcgttaattcgacttcattcacattaatttttacggcagggcgtgccgtaaaagaatgcttttgtaaattacttggcttgtttttgaaaactggggtaataatttcattttgttctgtcataaataaaaaatctccttactgatgatagtctcagtatagaagatccggggtagctagagctagacgtactgttattgactgcttactataaaggccatcttagttgacccagaaatagtaataaaacagcaaaacactaagctataattgctcattgattacagctcagtgttttgatagttagactttattgactggtttttgtaaccaatgaaagaaaatagcgcgctgactattagctaataaccaccatccactagctaatgaaaaggccccgatcacatcggaagtaaaatgagctcgtaaataaactcgcgaatacataataataatgatccatagagcgccgacgattcctaagattaccctctgccacttaactttacaatagggtaaaaggagggctaggatcgtaaaaatgaaaatagcagttgaaaaggtatgcccacttgggaaactatatccactaacatcaattaaccgaaaggaaggacggagacgagtaacactatacttgatgaggataactaaacagtaaccaataaattgtaacatgccataccaaacactatcagttgctcttccgcgacgccataacaggagcattaagccgattgttataatgccgactgtaactgggtcacccataaaggttaattcggtcaggatagtagtcttaaacttagacactggggcagtcagatcaaagccacctgcatcgattaaacgaacaaatggagatttagttaaaacattaaagagtaatactccgaataaaatccaacaaaaaagtccgaatccgatttgtgcttttttatgcattatttataggcctcattcatattcattattacatttaattatatcccatttattcttaaaaagttatcctctctccacgaaaacgtttacatttaaaataaatgcgatacaataaaagtaaaaaagaggaaggacgattttaatgaataaccaattatgtggatatgcaattgttgatcaaaagattacgattaattatcaaaacagtgctattgttttatcagttattacgcctgaaatcattcgagtatttcaagatcacggtgaaaaaggaacatcatatgctattgaaggcaataaaacaattaaaactaattttacagtcttagatcatggtgaccatcttgaattaactacggcagcgttaattgtaaaaatatacgacaacgagaaaatgaatgtatatgacaaggagggtcatccattagttattgattatcagggtaagcgaacaccgattgaccgtggattagataaggctcatgcaaaattagttgctgccgaaggtcatgatattgctggtggaagtgaccaagataagacatattttgaagtaattaaatctttagccactgatgaacagatatatggtcttggtgataaaactgggtacttgaataaacgtggctacgaatacgataactggaatactgataatccagcacctcaagtagaaagttttacccggctttataaatctattcctttcatgttaggcttgaagaacggtcacccatacggtcttttctttgataatccttatcggagccatcttgatttaggaaaagaaaatgctaattactacttttattccgcagtcgccggtaaccttgattattacattatcggtggtccgcacttgagcgatattgttaaaaattatacttaccttactgggcgcgttccattgccacaaaaatgggtacttggttatcagcaatcgcgttggggatatagtgtaagtcctgaaaaagttcaagagattgcgactaaactacgagaaaatgatcttccttgtgacgtgatccactttgacattgactatatggatggttaccgagtatttacttggaacaaagaaaagtttactgatcctcaagcatttgtttcaaagttgagagaccaaggatttagagtaatgccgattattgaccccggtgttaagcaagataaaaagtataaaatttataaagaaggaattaagaaaggatactttgttaagaatcctgatgggaccgtttatgttaataaggtttggcctggcgatgctgttttccctgactttggccgagaagaggtacaacaatggtgggctgataattgtaaataccttgttgataccggaacagctggaatttgggacgatatgaacgaaccagcatcgtttgaaggtgaaatccctgataatattgtctttagtgacggaaaatccccttctacccataagaaattgcataatgtttatggacataatatggcaaaggctacttacaatggattaaagaaatacagtcataaacgaccttatgtcattactcgggctgcttatgcgggaacgcaaaagtattcaaccgtctggacaggtgataaccaaagtttgtggcctcatctacaaatgatgattcctcaattatgtaatttaggaatgagtggctttgcctttgcgggaactgatattggtggatttggtgcagatgccacggccgaaatgctaacacggtggattgaggcagccttatttagtcctctctatcgtaatcacgcttcaatgggaacccgtgaacaagaaccttgggtattcggtgaaccaacgctctcaatctaccggaagtatttaaagttaagatatcgttttattccattcttatacgatctttgttacaaggagacaaagaatgggctcggaataatgcgtccgttagtattaaactacgatcaggatcctactgttcggacaatgaacgatgaatatatggttggcgatgaattactagtagctccagtagttcaagaaggccaaaatacacgagcagtctacttgccagcaggggagtggattgacttttggaacggtgttgaatatgcaggtaagcggtcaattttagtagaagcgccaattgataagttaccactattcgttaaaaagaatacgattattccatggggccctgaagtaagtcatattagtgatgaacctaatgaaacaatgaccttccgcttatatggacaacatgcctcatatactcattaccaagataacggccttgactttgcttatcaaagtggtgaatacaacctttatcaaatcaaggcttctcaaaatagagtaacaatagatatggctcataatggttatgataaaaattaccggaagatctttgtagaattaaatgatcaaaaattaacatttgaatttaatccccaaacacaaacatatgtccaacaataatctgagatagaagataagaccgaggaagaagtttagtgctaattcttcggtcttattttagtttacataatattcaacatagtgagagattgttgttatctttttacattcatccgtgatacactggaagttgatttatttttatagtcatgtggtaataagtcaagatggaattaccactggcttgattgctttgaccagatttttggcgtacttaaataagccttggttccaaggtgattttaaaactaagcgtcaaaaatcattttatcttcctataccaattacctcttttcttgataaatttggtgatttttgagtaggaagtaaatcaccctgattaatttacgtgcggtaagaacgagggctcgtttagaaggagtgtgttttacttctttgtatttacgctgataatactcgccaaagactggatcgtgcgttcgaactaggttggcagcttcaaccaagtaataacgaagataggtattaccagtcctctttaacggtgtgttatcgctagtgtaacttcccgattgcttttctctccaggaaagcccagcatatttagctaatttagcttcgttgtcaaatcgatcgatttgaccaatttcagctaaaataccagctgcatagactggtccgataccgggaattgagcgcagaatttgttcatcatcagttactttaacgactttctcaattgatttatcgagatccttaatcatcttttgaaatgccttaatctcttcagcatagacagagagaaccgcgtcaaccgaattagctacgactttatctagccggtacgaagaccaaacagccttttgaatcgttttcgctaaagcttcggggtctgcgaagcgacctcgaccgtgttcagccaaatagtcggttaaatcattgattgaaatattgagtaagtcatcagtagtcagatcttcagttaataactgcatcatggttgaaccaaatatagaagtattaagttcatcagagataacaagcttattgagcttatagtataagttttcaataaagtgttgtttagctcgaaccaggctttgaacaatctcatatctagaacgggttaagcgctgaagagcaatgtaattttcttgacgaacaattccaatcgaataatgaccaacacgtaagtaatctgcaatgtaataagcatcaatttgatcatttttgtcttcagcgaaaacatcgtgaaaacgtttagttttcttgggatcaacgacgactgattgagtattaaaagctttcagatcaatgtcttcttgaaagaacattgctgggtgaaaactataaatgaaagtagcttccattccgataataacttggtcaatttgatttgaattcgccgtgttaataatctgtttctttaattcagttgcgcctttcaaatcattgacaaagttacctcggaaaacaacttcgtggttttcttcggaaatcattgaagtcacaagatcttttgagctaacgtcaataccgacaaatagtttcattggaatggcctcctttcattaaaatttactggtcttaatctgatcactgcatgataacccctaattacaatcgctaaagacatcctcgcaagtatcagtatttcattggttagcgaatcaaagctgcacctaatcctactcagaattagttgattcactaatcgatacagcatgtgagttcgtaaattagctgattgcctgggcggcagactaattaagtagttaaaactacaggagacgataacctataccagttgaccaacgccaatgatgattagaggttatcatgcagtgaccagaaagcaagtagtaaagtatcaaaatccgtaaggactgatttatataatacgaggagacgagaagatgaaagaaacgcaagagaacactccattagctgttgcaacggttgttcttggaatagtcgttggttttagctcattgatccttagcgctattctagatttaacagagcactattttttaaactttaacgagacaaataagattccagttaatattaatatttttcctcttcatcgatttgtctcagtgctaataggggggataattgctacaattatttggtactttcttcaacgtcattatcacccggttagtattaagaatgccctgaatggtaaagagatgccgttaagaaaaacatttattcacgtggttacccagatctttttcgtagggactgggaattccatcggtcgtgaattagccccacgagaagcaggggctgctatcgctcaggaatggtctcgaatgcttaattcttatcggtggttgcaccttaatgatgaggataaacgtttattaatcgccgctgctgctggagctggattcgcgggggtctatattgcacctattacaggaactgttttctgtttagaaattttatatcggcgcattaatgcccgttcagtttccgttagcttaatcatgtcagtaatcgcaacgatgattggttcgattttaaaaggattcgaaccatattatattgttgggagtcgagatttctctttgctatctgttccattagcaattgtgctaggattaatccttggagtaaccggaacctggtttaaacaaggagttaaagcagcttctagtaaacgggcaacaggtaaaaatattttctggcaattaccacttttatcgttctcggcaggagcaattgcagctttttatccacaaattatgggaaacgggcggggacttgctcaattagccatgaatacgaccaccgtcaattctcaggtcctaggagcgctcttgtttggtctagttgctaaagtaatagttaccttatttacaatcaaatgtgggggctatggaggaacactgacgccatcgattgccgctggagcagttattggagtatttctcggtattccttatatgcacttcttcccggttgttaccttaacgcagtgtgcagttattggggcctcattatttttagcagcgtcacagcaggcaccgttaatggcattatttatgttatttgaagtttgtcaccttaactttacagcttttcttccgttggggattggagtcgcaatttcaattggaatttcaaaatggatgcaggaagcaaaagcaaggacaaaataacctttagtaaaaacattctctaataaaatagcaaggctgaaatttcttccaaccttgctattttttatttatacaaattcttcattttctttacagttgctgcaagatccttgctatcaaagactaaggaaataacagctagccctgcaacgccagtgtcatgaacaactttcatattttcttcatcgatgcccccaattgcaactacaggacgttcgctaatcatgtttaaacgttcaagacgattgataccaatagcagcatcagcgtcaggctttgattttgtagggaaaacgggaccacaaccaatataatcaacaaagtccattgtattagcacgttcaacttgttctggtgtattacaggaatagccgatgaacatctgatgacctacagcgacagatacttgttcaattttagtatcattttgtccaacgtgaactccatcagcgtttatttgctgagccaattcataatcgtcatcaacaatcaatggaattccatagcgcgtacataaggtccgtagttctagtcctaagtctactcgttcattaggccgtaacttcgagtttcccttttctcgatattggaaggcagtgataccactcttcattgctagctctactttttcaagaaatttaacaacgtcattatggacatcttgtgttccaccaactaagtatacttgtaacatttttggatcaaacatcattttagatcgtctccttcaattttaacccagtgattaagtggcccatgaccatgaccaacattaatacccttgctaatcgtcttttcgacatatgtcttcccaatcataattgcctgttccatggagtgacccttagcaatttccgcagtaatacatgcagaaattgtatcaccagtcccatgagtatttttagtattaacacgaggcgcagttaaccacatatcattgccatcttcaaataaaatataatcatcagctttgtctgaagattctgcatggccaccttttatgagaatattttttgctccacgcttttgtaattcgcgggcagcctttttaatatcatttttatcccttattgtgattcccgtcaactcacaagcttctggaatgtttggcgtaatcagagaggcgagggggataagttcatctcttacaattgaaattgcatcatcactaagtaactttgcgcccccctttgctaccatgaccggatcgacaataagcggtcctaaatcatatttctttaaatttcgtacaaccgttcttacacggagagggtcagccaacatccccgttttacaagccctaattttcaaatcaccagcgattgaagcaaattgctcattaattaatttttcaggcattggcagggcatcttgcactcctaatgtattttgcgcagtgactgcgacaactaccattgctgagtatactccgcgcatttgcatcgtctttacatccgctggaataccggcaccaccgccactatcagttccagcaattgttaaagcctggggataatcattaatcaaggtaatcttcctcactttcctcaaagaattctagtaatgctttcgtatccataatcgaaagctggtcaaaaaactgtacttgccacgaaccgagtccgactgaataacggttagctaatactccagcagcagataccaaaaccgttgcaacaatacaagcatcccaagtattagaagtgatccctagaaatgcagcgatgatactagaaagcatgtcgccactacccacattcatcgttaacatctcggcagaaaagggattttcatagatgacttgcccatcagttattatgtcagtttcactagtcaagactacaattgaatggtaacgtcgagcacacgttttggcaatttgaacctgattaggaactttaccagcgtcgattccatgactagtattgtcagcttctactaaagcagcaatttcactggcgttaccacgaataacatcaaaatgaaaatcatttagcaatgagtgggcaaactctaagcgagatggaatcgcacttaccgctaccggatctaaaacgaggggtttgagtggcgtggcagctcgcaaaaccgtcctaatttgtgtcgcctgatgctcattgattgttccgagattgatagaaagagcattggctagtgccaccatctcatctgcttcagtgggctcaacagacatgattggcgacgcgccgacagcactaacggcatcggcaactttatcaattgttactaaattggcgagattaaggacaatcgggtttttagtacgaactcgatcgatcagtgaccagttaatttgacgttgtaccataaaattagctccttaaataaaaaatactcaaggtaggagatacacctactttgagtattaaagtccggtgcattttcctacgcaagcgttaacttacaggttctagagtccatgcatcactgcatatctcagcccagcactatgggcacccctaatgcaataaatttagtataccgcaaattattctttatgaatattaataaagataattggcaaaatgggaatgataattgtaaaatgtaataaaccgcgttattagaaaacctacgggtaaaatgaattgatataggcttttttgacatcatatattcttagagaatgctataaaataaccaattagttaaaatgttaactccattcttaaatgataatacgtttaccccaaaaataaatttagagtatttgaatacagttcatatactccttcgaccgtactaaataacttgtaatatgcgtataaaataattgttagttttaatataaagtagtttatgattaatagcgctacattaacaaaattactttcggtaaagttacattctaaattgatttttatttatagttgataaaaagaggtctaaatttcattagggaagttttttaatggatttgaaggtactccatcaaaaattacttcgtgaatacttgttttatttgattatttataataaagctcgttattagagattcgaatcatcatatgatttgaatttatgggtggttttttaataaaagttcgaatatagagagttgtatatatgtttagagattaatattgctttgtgaacataattgtcggcttagtaacaaatagatgatgacacccctcacacaaatgtgaagggtgtcttttaataataagtatataaaaaatcggctctctaataattatcgatcatatattgtttattgaaaacgtacatcttcttctttgccaacttcttcgtcaaaataacctaatccatttacttcgagtgtttttagataagctaccaattcaattgcggaactaggacttaattcgtttactgcattcaaaccaagaccagttggaacagtttcgctcattgctgtaatttggttatcattctcaatatgaacttgtgagcaactaattgcccaacgattattgacgtttggagcaaaaataaagaagaggttgaaatcggctgaaagatatgccggtaagaaccaggcaatgttatctaatcgttctgggttgaggttaccttgaagcgcaaaacggttgatattttcttcacaagggattgctttgagcataaacatggtattttcaaactctctcatccctaatttcatttccggtgtaattttgggcttcatatcatctaaaatctcctaactaaagttttcacggtagtagttatacttatttcttatatcttggagcggggcgtccatcacgtgcattttcccatgggcatcaagcttgaaattgtttgcgattacctgattgaactgcaggcggagacgaggatattggatgaggattttctcaatgttagttgacataatatcaagagcggcaagatatttggggacaagaattttcttaaattcgttaaacgtatctgcaatcacctcagcataggcatggtcagcatatttcagttcgttttcctctaatttatcgtaatactccctgcttgtcaggccacgttcatttttaatgttgtattgctcatcgtattggtgggtaagataagaatcccagtcacgatagcaataagtaatcatttggattactaattggcgtccctcgtaattaacgtttttcggaatcatctttccctgtggatttaacaagtaaggtcggattagctgtcgcgttacaatatcataaaaggttcctggcacaagttccttatcttgactatcctcatataaatctccggaaccttcaagcttttttagtttacggagactttcacgagtttggttggcggcataaataacatcttcaatctcttgatcaattatttcacgtttactaatcttttgtaagaggtttgtgtagagccggattaaattatggagttcagactgctgattagggtagaaaccgttttgttgctgatattttctagtttcccgttccaattgttgctcaattgcaagggcctgatgctcaattttaacaggcaagactggttgcgaaaagctatctttagcaagctgctgaactgcttcacggatgattggtctcatttcacgaaaatccggaaaatcaaagaaattttgaaaatcattagcaaagtttaggtgtttatatactgctgatttaagatttcgcttcataaaatattcctccattttctttgattttaatacgaaaaagagtaagaaaatattagggaattagataaaaacccttattttatttgtatttaactcgcctataattaaatataaataaaatagaggagactataatgaaaaaattattgaagcttttagcaatctttttactgtttagtagtattattagcagttcggcgatggctagttcaacaagaaccataacggatatgacaggggagaaaataaagatcccaaagaaagttaaccgcgttgctgacttatggcatgctaataatcaggttgtgctgttattaggaggacaaaataagctagttgccactactcctcttgttaagaaacaacattggttcacaatggtagatccaaaaattgctaaagttgctgcgccattagcaggcaatcaaattcaagttgaagaattagtaaaaataaaaccggacgttgtaattgcttccgatcaagctcaaataaaggaatcccgtcaagcaaaattaccaacagttaacgcaatgtatactgattttgctgggttaaagaagtcggttacattaactgcagaaattttagggggaaattctccaaagattgctcggcaatacaataaagaattaacaaacaacattaatcttgttaagcagcatttgaagagccgaaaatcaacgccaacggttcttcatattgttaatgcaacagatcttaccaaggttgacggacaaaaaacaattgttaacgaatggattaaactagcaggtggaaagaatgctatttctaaaaagggaaatcaaatttcagttacgcctgaagaattgattaaagcgaatccagatgtaattatcgttggtagtacatctactgcccaagcgcgaaaagcgttacgtgctaacagtcagctaagtcaattgaaggctgtatgcgaaaacaaagtatacggaaatcctcaagggaccttcccatgggatcgttatagtgcagaagaagcacttcaagtcttatgggcagctaagactcttcatccccaagaaatgaagaatattaacatggtctctgaagttcaaaaattttatcaaaaatactaccactacaatttaacagttaaacaagcaaagcaaattttagctggtgaaaattagcataaaaaacatcccctaaactggatattaattatccaaagcaaggggatgtttttaattagagcttaatttgacaagtatatcgttgaagatcaggtagataagtaagagttagtggaacatgatagatcctttctagctgtttagttgacattaactcttcacatgatccagtaaccatggaaccttttgaatcaagaagaccgattgtagtcggtagcattaaagcatggtctggaaggtgagtagtaagaataatggtgattttttgctgggctaagtcttgaattagttttaatatttcgtactgtcgacttaaatcaagggcagccataggttcatcgagaattaacaagcgcggttcttgaagtagggctcgaataatcgtaattagttgctgttgaccaccgcttaatgagataaaggggtgatcacgaaaaggtgaaagatgaaaacgttgtaaataggtttcagcaagttgaacgtctttctgatgcggagtttggagaaaagaaaggtaaggtgcacgaccagttaataaataatcaagtactgtgagattggaattaatatgataatcctgaggaacataggcaacttgttgtgcaagcgttttgtgcttcaaatttccaagctcttttccgttaactattacggttccttcatttggtgtcaaaagtccgactaaacagtggagaagagttgattttccgacaccgttagggccaaggatagtaaatacttctccagcttcgagactaaagttaacgttgtgaaagaccggatgtgtttttgaataggcaaaactaaggttattaacttcgaggactttcaatttaattgcaccttcttcttaattagaatataaacaaataagggtgcgccgatgaagccagttaggatacttaacgggatttcccctgccgatagggatcgagccattgtatcgacaattaacaaaaatagcgcaccaataactgctgcaaggggaagggtttcttttgtattatccccaactaaaagtcgagcaatatgcggaattacaagtccaatccagccaatatttccgctaagacaaactgttgcagcggttaaaaacgtgctggcggtaattatcagtagttgttccatatccacattaattccttctaggcgcgcttgttggttgccaagtgaaagaattgtcatatgccagcgaaggacaaatagaattattgtacctacaagcaaaaagggaaggacagcgataatatttgaaaaatcaacttttgctaaactgcctagttgccagtagacaatactttgtaattgtgaatccggatcagcaatgtactttagtaatccaactaatgcctgcataaaaccagaaatcacaattccggctaatactagaattaaggttccgcgctgatgaaggatttgggcaatcaataaagttaaactgaccgcaataattccaccaacaaaagcaaaaagctgagtaagtccaatgccatagcctaagagaattgcactagcagccccggcggccgaaccatacgacacccctaaaatatcaggcgagaccaaaggattatgaaaaacactctggaaagaacaaccagccattgctagaccagcaccaattaacagcgcaccgatgattctaggaagacgaaggctaaaaataatgtttgctgcggctggattgctttggggatgaagtagcgtttgaaagattatgattggtgaataatagatccgcccacaagaaagagcgagaacgattgtaacaataaccaacaaaattgcagtaaaaagtgttagatgataatgatgcttagtaattagaatctcttccttttcttaagaaattagtgatttcatcagtaactgtttgctgagcggttggcaggtcttcatagtcgatttttaatgaagacgctaatggtgaagcaccatgttgacgcaattggtaattaaaaatatttactgcgttagcaaattttgctggaccaaaatttttatctcctacacctgcaatataataaaccagcctcgggacagaaaactgacaaagataattatagaacttttcttcagaggctgtgagttgtccttcgccataagtacagggacaaaggataagcaagtcaatactatccaattttacttgtaaggcctccttaaaagaaagaaaaatggcagacggaaggatagtttggtgaataaagtttcctaattcgaagttatgaccgtagagtgtatcgtagagaattaaagtattcattgattaatcgtcctttcattcaggtgctagtataacaagtctcttaaaatcctattattagggatttgactaattctaaagggccattatcgtgtgtaataataagcatgataaaggcgggtgattattgttgcattatttacgaataagcgatgagcccatcgatgtaagtgagatgtataaacagcttgttgctccagaatacggaggaattgatatgtttgtcggcactgttcgtcaatggactggcgagatcgagactactaagattgagtattcagcttatcatcccatggcggaaaaacaattagaaaaaattgcagcaccgattgaagaacaaggaggacgcgttgttgtcgctcaccggactggcgaattgacgcttactgatatcgcggtatttgtaggtgtggcggctccgcatcgtgcagaagcattcaaatggtgccaacatgtgattgatacacttaagcatgaagtaccaatctggaaaaaggaatatgatacagataaggtaaggtggggaaactaatggaaattaacgttaaattatttgcgtttttacaagatcagttaggaccatctattactcttgatgttgctaatcctattcgagtagatgaccttcttaagcaaattagccagcgggcaccacaactgacgtcaactttagcaaattcgcggatagcaattaatcaagaatttgttaacgcagatataattaccttagaggccgatgatgaaatcgcaatcattccgccggttagtggtggctagattactctagaagatagttagaattacataggaggaggacttgattatgtcaagtgttaaagatgttgctcatgggagtaggcgaaatgcttatactgcattgatcctctccacgcttgcaatgattgtttgttttatgtcgtggtctaactttgcgccacttgcatcccaaattgctgagatgttcaatttggatgtatcgcagcgaacgttgttattagcgacaccagtccttttgggatcaattatgcgaattccagtagggatcttaagtgatcgttacggcgggaaaaaggtttatttgatcttaatggcctttattttgattccactaattatgattccacatgttcattcatttggaatgttgctctttgccgcattgcttgttgggatgtcaggaacatcatttgccgttggggtttcttatgcttcagtttggtttccgccagaacagcaaggactagccctgggaatcgtttcaatggggaatatggggaatgctgtggctgccatgactttaccttatatttccaaggcagcgggatttgatagtgtttactactttttgattattcttacagtgatctttggtgttcttttcgcagttttttgtaaagaaatgccagttgataaaagtaaaacgattaagggcgcattgtctgttgccgcggacagtggaacatggtatctatcactattttacttcttgacttttggcttatttgttgcatttacaaacttaacgccaacattcttgacagggatgtttcattatactcctgttactgccggcctttattcagcattatttgctttcgtatgtacgttagttcgtccatttggtggttaccttgctgatagaaaacgccccatggcattattacaatgggtctttgtagcaatcgttatttttgctatttggattatgcttagttttcacaatcaattcatgtttatcgcagggattgttttggttggtctttctgcagggattggtaacggggttgtcttcaaaatggttccatatgtatcccaaggtaatacgggagcggttactggtttcgttggagcagttggtggcttaggaggtttctttccaccactaattattggttatatttaccaatggacaggtagttatgagcttggaattgcactcttagcgttaaccggtgtaatttgctggtttgctctatggaaacattacattcatggtgatgttcacatcgttaaataatacattgaaaaaatggagatgagggtaatttttccctaatctccatttttagttttaaattattctttttttaatttttcaactaatcgaaacaattcatcctgagtttggccagctggtaacactttaatatcaaggattagctgggagaagatatcatcaattagttgcttgacatcatcaattcgttcaagtgctaattgatgggcttgcttaaacatcgcttgtgaaggacgatgatctgaagcgaagaaatcactaaaccattgtggattctgttggcgcgcgaataaaagtgccaggggatactgaccactcgttatcatctttacaaatgagtcgggatcattactgagttgttgaaactcatatgtaatataactagcagtaccaaaggcttgaccaatctgtcctgcaagtgaaacaatttccctttttgctccgctaaggacggcactttgttttgcagtcattgttccaagtaatccccatcgtgctttaacatctgctaaatagtcagctaccttaaattgctgattatagttaaactgtagccgtcgaatctgtgcaagcatcacatctccagcgtcagttgtcaactcctcaattatttgtggaggattacctacagtacttagtgaacggacaaagcgattcattaagtagctcgcaacatatgaataagctttttgactagcgaatttcccaggagttaggttatttggctgaaaagaaggaggattcaaatgagttgctaatgccaatagttctggtagttgagcagctgtaatttgatcaattgtgagatctttttcgttgaaataactaaaagcctcaaaaagcgacaaccttagccgccgttcttcttcaccagtactcaagttaatcatttcgcgaaccattggtggatattgataaataacggttgttaatgcatctaccaaccgttcatctggcgttaaattcacagtatcagtccttaaatttatttacttcagcaattatttgttcagcaacggggatgaagatatcactgaaatactcattaaaatcaacattttttacttgcttctcagtaaattcttgtgcacggtgaaaagcatcattacgcatattaacgataagagcttctcgttgatgtttaagtcgcttatgtagcttctcgttgtcattgctcatgtagaaatagtaataaatttcgtagaaggtattatcaagaacccaaaagagggtgctccgtcgaatattatcgcttatcatttcagtaaaggaatttttaccaagaagctcatggttagcaaaggctcccgcagataatacgattgcttgaacttcatgcatatcagccatatagtggcagaattgattaatttcattttctggaacactaaatcccagcttttcttttcgttccgcctcagtcatcttagaaaaagtgatctgatactcttgcatcacattctgattatctgcaatcaaatccttttcgataatcgttagtaaagcaaaattatcttgcataaattccttaacagtttgccatattttttcaatttgttcattaaagtttgtgaaaagatcttgaacggtgcctattctttttttaaccacttcttttttctctacatgaggggcatattgaattagaagaggaatatcatcgttatgttcatctagaccgtgcttggaccgttgctcattttcataatttttaagttcatcaagatcaacaaggccgaggggcattacattaatttcaccatttgtaagcatgatttgtaaggcaaacggggtggttgtttcttgattctcgactaatgattttaaggcatcaaataattttctacgatttgcaagttcattatctggatctgcgtaaaagcctgcagtatagatcgatttattttcgtaatctcgttttagcttatcttgaatatccatcttaattaattctcctttgttgattgagcaagaagttgtgcaagcttattacggccgcgatcagttaaagcagcatcttttaaatttatctctgctaatgttgaactaaatgattcgtcaataactgctccagaaatatattggttttcaactgcatatttagttgttaaaaacaggttggaaacgggattaacttgtcgactattagtaaaacgtttgcgagcaatatcactaagaattcctcgtaattcatcatctcgactgaggtttgtcgccattaggaatccactcctttaatcgtattttctttattgtagaaaaacatcgacgtaaataaaatcggggattcttcctaattaagaatccccgcctagttaaaggtcaattaaatggtgatgaatagcatattgtactagttcaacccgtccatgtaagtgaagtttgcgtgaaatatttgctttatgggcttccactgtctttgttgaaataaacatcttttgtgagatctctttatttgaataccctaaagcaataagtggaaagacttctttctccctttttgaaagactattatagccctttaattttaaggtattaccagatgcatttatttctctaatatctgtcttactaacaatgatatttgcatcaagatatttctcgccatttataacatgttttagggcattaacaatttcgctatctggtgaacttttcaaaatataagacattgcgccatttgccattgccttgttgatatattcctgttcttcatgcatcgagagaatgataattttaactttgggaaacttatcatggattcgacgagtagtaattaggccattttcgccagggggcatacttaaatccataattaagatatcaattccgccttgttcaactcgaatatatgtatcagttccactcgctgtcccatcaaccaccgtaaaattcggttgaagatcgactaagtatgaaattcctgagcgaacaattgcgtggtcgtctgcaactaaaacgttatacatttgttctcaccatatccttatttaaagcattattatagggaaactttaccttgactgtcgttcccttattaatttttgatgtaattgtaaaggctccgttatatgccttaacgcgttcattcatattcattaatccaagtgaatgcccattaaatccactatgctgatcaatatcaaatccaattccattatcaagaatctctaactgaaggtaactattgtgatccgtaacaataatacttatttctgttgaatgagcatgtttaattgcgttattaattgcctcttgtgtaatgcggtaaagaacgttttgaatgtttttttgtaatttttcagcagaggtaagggctataacatcaattgtgattcctgtactattttgaagacgtttcgccaaagctttgattgccggaattaagccaaaattgtcaagaactgaggggcgaatatcaagtgcgagccctttaatctctttaagggtcgtttgtaattgcttttcgattgcagcactcattgattgaaattgctcagtatttcgttgcttttgcaccgttgctaatctttgaacgcccattattgcggcgtagattccctgtgcaacactatcgtgaagatcttgtgagattttttgccgttccttttcgtgtgcttcattgacatattgattgagaattcggtgctcttcaatctgcgaaaggcgttgctgttgctcacgattttcaagagtcagggcaaagacactttctttatcgtcaagaggacgataaaccattgaaaaatgaaaaggatgagtagcgttggagtgaaacgttatcggaacggtagctcccgttaaccgctttttaatcaagcatgaagcacaatcatcattttctagttgtgaccaagcgtttttaccaatttgcagtaggtaattaacatctaaattaagcatagttactaaccgctgagccggctcattactaactaaaagatcatcatttttaaataagaagattgcatctggtgattgattaaaatatttttgtatccaattagcagtttcaagcacgatctgcttcctccccaattaattgtctttataatattcctattttatataataacgttttctcgagttagaagcaacgctggcccacttaaaaggcagggctaagaaaagctctgcttctttagccctgccgtctgagttttaaggatgtcgtggtaatcccatcgatggtccctggaaatacttagttgcactaaaatcaaatttcggatcctgaaattcgcggtaatgatcaaaatcagcttgaatctgttgaatttggtcgtccagttgttctaactccgcatctttttccagcgaactcatttgttggcttacttcttgttcccgattttctagcattgttcgtctaattgttaagtcatttaaaacaagggaaatgagcttttgaaaatcaggatttgtcattgaatctttacttttcatttaaatcgacctcacgatagtttaaatttgaaaattcgttacttgagcgatacttaaggggtggcagacgcacttattagtgatgaaactacgtaatcgccagtcatcattattatcaacccaagtagtaacttgttcattgctaactgaaaaatgagctaatgaatagtgattgtgctgacttgttgcaatataagagttggacgtacgagcaagaacagcaagtacatcttttgtgatatatggataatcaacagccaaagttaaatagtcttgaacaacggaaaattgactagtacaagcaataattgctgaaaggggaccatgatgatcataaggggaaatatcacagataatctgcacagccggttcttgaccaaccaactttaatatatgcgctcgatttatttcattagcacaaacaacgatttgctgacaaaagggtgttaatttctcgactgctagctctatattggtagctggtaatcctggaacatgataagtagctttatctttcccaaaacgggtagatttaccaccagcatatactaatccaatcatcctgcatccccctttacttgttttaagtagtcatagcaccaatttacaattgcatcttttcctaataagtcagcggttgttccattaaagatactacctattttaagagggggagtatgagcaacattggtaggatcttcgccaggctttaataataaaatttgcggatattgagtggcttccttatgaccttcaatcaagacaaaatcattatcggtacttaataattcaaccatttccgttaaagacggaacattacttttttgatgaaagaaaaattcagtcgcagattgtaaaataacctgtttagctccagcactactcattctagcactgtcagtagttggcacatccattgcggcattatgggcatcatgtttaagagcagctactcgatacccttcttttgagagcctttcgattaaagtcgtcgtgataagagtcttgccgctttttttatgaccgattatttgaagggtaatagccatgcgtctgtctccgttccgaccttcattggagtagtactatgcggaatcagtgctaaacaggttgtcgtctggaggttagctaatgagccagatctgttgattccatttggataaacataaaattgattatctttgaattcataagtacaacgaagataccgatcaaagccgttagttttattatatggggccgctaatattgcccgtacttgcttaattcggctggcttggtgttgataacggcgaatcagcggttccatataaaggtaaaaaccagtaaaacaagctcctggattcccagaaagagccattattaacgtattattttgaacaaaggcagtcgtaacgcttcctggtcgttgtttaatcttattaaaaagcaattcatcagctttacgtgcttcatctccaataaaatcaaaatcaccaactgaaacaccaccatcagtaattacaatttcatgagttgctatttgttcttcaagagtctgcttgataagatcagcatcatctggtaattgggtttcaaaatcaacaatcccaccagtttcttctaccagattttttaacataataccattactattaaagatctttcccggttcaatcgtggcattaggtcctaataattcagttccagtggcgataattgcaatccgtggttttttataaactgttacttcttgaacaccaaaagccgttaaaactgctaggccaccgggatttatttcctggtcttttgctaaaacgatatcaccgctttttacatcagtaccagcttccgtaatgttagtcttgctttcagtcgtaataatttgaaccttattttcatctttagcgggccgcgttttttcaattcgaattacttttcctacatcaaaagggacatatgcaccagtcataattcggaccgcatcccctgattgtaatggttgatcccaagttgctccagcttgaatctctcctcggacgttaaattcgcgagggaagtcatgatcatcgctggctaaaatggcataaccatccattccagcccgtcgaaaatgaggataatcataattggcatgaacatctttagctaaaacacggtggtcagcttctgataacgggattgtctctgtagctgttttaaggggaatttcgttaatctttttctgtgcctcggcaacagagattggaattcttctagtgagcatggtgatgaacttcctttcgttgagaactgctttcaaataataaatgttcatattctggcaaaattagtttacttagagccgtttgacaggcattctgggaaccaggtaaacaataggtaagctgattgcggaaattaaatccggctagggcttgtgatgcaagcgcacgagtaccaatttcatcaaaagatatctggcgaaacgcttccccaaaacccggaattagacgtttgaggagtggacggatagccggaatagtaacatcacgctgagcaattcctgttccaccattagtaatgatgatatcaagagcttgttgttctagttgaaggtaggcagtttgaatattgacaatatcatcattaacgattacccgatcaactactgataagcccgcgttagccatctttatagcaattaattttccagaagtatcgctatctaatgttcggctatcgctaaccgttaaaattgcgatttttttcataataggtcttctttcatcaaaatatttaacgacttaaactgtttctgggcaatcgccgaagtaggtaagtcatacataacaatcttaccattcttgaatatacttactggacgattttcccatttaaaatgaagaaacaatcgatttgcgttgattaagagctcttttttagccaaaaattctttaagtctgccaaaattaataggtttctctttgatcgtataatatgcattttccccacataatatatgtaattctggtgctgattcttcttctaaagaaatactgcttggcttagcacaggcgggacaatggtaatttttattaatagcaaacttactaaattgcattgaccaattgtcaaccgcgatcaattcattaaaattaacctgtgttttgtcaaccagataatgaagcgctaaagatacctgtagtcccgccacaatcgggattaaagcagtattaaccccaattaaatcacaatcgttttgttttaattcattaatattaggaaaaagacagttcaagcagggatgattttgtggcgaaatcgccattacgttcccataggttcctgcacagctggcaaacagataatcaaagtttttgatgattgctaatttgtttaatagatcccgtgcttgataattatcaagacagtctaaacaaagggtaaactgatattcgtcaataaggtcagcagtaatcggcgctgggatcgcagtaatttgacatactgaattaattttatgtaaatgttctttagctgcttctaccttaagccgttgttggctagcatcttcttcggtgaaaagcgattgacgttgaagattagttacgtcaacagtgtcaggatcaatcaagataagtcttttaactccagcacggacaagttgctcggctgtataacttcccaatgcccctacaccgacaatcataatagttgcatggctaattttttgctgaccaatactaccaatttgatgtaccctttcttgacgatcataacgattcatggatattagcacctcatttagttcaaaatataggtatttccctagtcgtagtatagcagttatggtgctaatctttacattagggaaaagacttactttatttttaatattggtaagccattcaataaaggaggtcaatcaacgatgaagtcacggttctttaacaaggttgataagtttaatggaacctttacacaacttgaagaaaatagtcgtcgttgggaaaagctttatcgccagcgatgggcgcatgacaaagttgtccgaacaactcatggagttaactgtacaggctcgtgttcttggaatgtttatgtcaagcaaggaattattacttgggaacaccaagccacagattatccatcatgcggacctaatattccaggatatgaaccacggggatgtcctcggggagctagtttctcttggtatgaatacagtcccgttcgaattaagtatccatatattcgtggcaagttatgggagctttggactgctgccaagaaagaacatgaaaatcccttagatgcgtgggcaagtattgtcgaagatccagaaaagtctaaaaaatataagaaggtccgaggacacggtggcttaattcgtgttcatcgttatgaagcattagaaatgatttcagctgcttgcttatacacaattaagaagtatgggcctgaccgcattggtggttttaccccaattcctgcaatgtcaatgatgagttttagtgccggagcacggttcattgccttaatgggtggggaacaaatgagtttctacgattggtatgctgatctaccacctgcatctcctcagatttggggtgaacagactgatgttccagaatccgcagaatggtataacagttcttacattattatgtggggatcaaacgtcccattaactcggacgccggatgcgcacttcatgacagaggttaggtacaaaggaacaaagattgtggcagttagccctgattatgctgaaaatgtgaaatttgctgatgattggcttgcaccagaaccaggtagtgattctgctgttgctcaagcgatgacttatgtaattttagatgaattctaccaaaagcacccagttaaacgtttcattgattactccaagcgatttactgatttaccatttatggttgaattggaaccaagtacagcaaatggtgatcactatacaccaggtcgcttcgtccggattagtgacttagttgctgatgatacgattgtcaatccagcatggaagacagttgtttatgaccaaaataaccacaagattgttgttccaaatggaacgatgggacaagaatataatgctaaggaaaaatggaatcttgaattattagaccaaaatggtaataagattgatccggcactttctattaatgatcaagatggcgaaactgaacaaattattgctgattttccagcgtttagtaatgacggaaacagcgttgtgcaacgtcatttaccagttaaaaagctcaaattcacagatggcaaagaacacttggtaactaatgtttatgatctgatgatggctcaaatgggaattaatcggactggtaatgatgaacttgctgctaaagatgcaatggatgctgagagttactttactcctgcttggcaagaaagccgttcgggagtaaaagcagagcaagttattcaaattgctcgtgaatttgcccaaaacgcggccgaaaatgaagggcggagtatggtaatcatgggtggtggagtcaaccactggttcaatgccgatatgaactatcgaaacattattaatatgctgatgttgtgtggttgtgttggtatgactggtggtggttgggctcactacgttggtcaagaaaagctccgtccacaagagggttgggcaaatattacttttgctaatgactgggaaaaaggtagtgcccgtcaaatgcaaggtactacttggtattactttgcaactgatcaatggcgttatgaagaaattgataaccaagctcaaaaatcacctgtttggaagagtaaacattcctacttacataatgctgattataatcaaatggcaattcgtttaggatggttaccatcatacccacaatttgatcgtaatccgttatcttttgcaaaagattacaatacaactgatattaatgaaatttcaaagaaagttgtcgatgaattgaagaagggctctttacattttgctgctgaagatcctgatgctaaccaaaatcaacctaaagcgttcttcttatggcgttcaaacttatttgcttcttctggcaaaggtgccgaatactttatgaaacatttattaggcgctgaaaatggattgcttgctaaacctaatgatcgagttaagccccaggatatgatttggcgtgataaaggagcaattggtaagttagatcttgttgttgatatggacttccgaatggtttcaacaccaatgtactccgatgttgtcctaccagctgctacttggtatgaaaagaaggacctttcatcaactgatatgcatccatttattcacccatttaatgcagcagttagtccaatgtgggaatcaaagtctgactggcaacaattcaagctcttagcaaaaactgtttctgaaatggcaaagaaatacatgccgggaaccttctatgatcttaagagcgcaccactaggacataatactcaaggggaaatcgctcaaccatacggggaaattaaagattggaagaatggtgaaactgaaccaattccaggaaaaacaatgccttccttgaaattagttactcgtgattacaccaagatttacgataaattcattacccttggacctaatatagtgaataactatggctataaagtcgatgatcaatatgattatttaaaggaaataaatggaactgccagcgaaggcattggtgcaggctgtccgttacttgatgaagatgaaaaagtatgtgatgcaatcttacggatgtcaactgcttccaatggtaaactcgctgaccgagcctgggaaaagaagcaagagcgaacgggtgaatatttaacagatattggccgtggtcatgctgatgattcaatgtcatttaagcaaatcactgctcaaccacaagaagcctatccaacaccaatcggaacttctgctaaacatggtggggctcgctacacaccattctcattaatgactgagcgaaatattcctacatttactcttacaggtcgtcagcatttctacattgatcatgaaattttccgtgaatttggtgaaaatatggcaacttataaaccatccttaccaccagttgtaatggccccaggagatattgatgttccaccagtaaaagatgaagttacacttaaatatatgactcctcatggtaaatggaatattcatacgatgtactacgataaccttgaaatgttgacattattccggggtggtccaactatttggattagtccccaagatgccgataagattaaggtaaaagataacgactggatcgaagtttataaccgtaatggggttgttactgcgcgggcggttgtttctgttcggatgcctgaggggtcaatgtacatgtaccatgcccaagataacgaaatttacgaacctctttctaccattaccggtaatcgtgggggatcacataatgcaccaacgcaaatccacgttaagccaacacacatggttggaggatacggccaattgagttacggttggaattactatggaccaactgggaaccaacgtgatctttatgcaaatgtaagaaagttgaagaaggtgaactggagtgaagattaaagcacaaatcagcatggtcttaaacctcgataagtgtattggttgtcatacctgttcagtaacttgtaagaatacatggacaaatcgtccaggcgctgaatacatgtggtttaataatgttgaaactaagccaggtgtcggttatccaaaacgctgggaagatgaagatcaataccatggaggatggacccttaattcaaaaggtaaattaaaattacgtgctggaagcaaattaaataaaatcgctcttggtaagattttttacaataatgatatgccagagttagataactactatgaaccatggacctatgattataagacgttatttggccctgaacaaaagcaccaacctgttgctcgtcctaagtcgcaaattactggcgaaggaatggaattaaccactggtcctaactgggatgatgacttagcgggatcaactgaatatgtccaacaggatcctaacatgcaaaaaattgaaggggatatcaaaaataactttgagcaggcctttatgatgtatcttcccgattatgtgagcactgtttgaatgcaccttgtgtagcctcttgtccatcaggcgcaatgtacaaacgagatgaagatgggattgttttagtagaccaagaacgctgtcggggatggcgtttttgcatgactggatgtccatataagaaggtctactttaactggaagactcataaggctgaaaaatgtactttttgttatccgcgaattgaagaaggtcaaccaacagtttgcgccgaaacctgtgtcggtcgaattcgatatattggtgctattctatacgatgctgatcgagtagaagaggcagcatcaactcctgatgagagtaagctgtatgaagcacaacttggcttattcctcgatcccaacgatcctgaagttgtcaagcaagcactcaaggatggcatttctgaagagatgattgaggctgcacaaaagtcaccgatctataaaatggcagtaaaagaaaagattgccttcccacttcacccagaataccggacaatgccaatggtttggtacattccgccgctatcaccagttatgagttactttgaaggacgggactcaataaagaatcctgaaatgatcttcccaggaattgatcaaatgcgggtgcctgttcaatacttggcaagtctattaactgctggaaacgttcctgtcatcaagaaagccttatataaacttgcaatgatgcggctatacatgcgtgctaagactagtggtcgggattttgatagcagtaaactagaacgagttgatttaacagaagaacgggcaacatcactttatcgtttactggcaattgctaaatatgaagaccgctttgttattccaagtagccaaaaggcagaaatggaagatgcacaaaccgaacaaggtagtcttggctatgatgaatgtgaaggctgtgcattagctccccaacacaagagtatgtttaagaaggcagaagctggcaaatcaactaatcagatttatgctgatagtttctatggagggatttggcgtgattgattttagacgattgacagatttaaaggatacatttgccgttctttcccgtttgattgactatcctgatacagaaacgttttcaccagagattcgtcaattattacttacagataacgcattatcaacagcaacgcggggagaattattaagcctttttgatgaattagccgcactatcttcaatcgaagtccaagagatatacgctcacctttttgaaatgaaccgacgttatactctttatatgtcatactataagatgaccgattcccgtgaacgagggaccattttagcacggttgaaaatgctatatgagatgtttggtatatcagaggcgaccagtgaactttctgattatttgcctctattgttagaatttctagcatatggcgattatactaatgatccgcgtcgtcaggatatccaattagcattaagtgtgattgaagatggaacttatacccttttaaaaaatgcagtgacagatagtgatagtccctatattcagttaatcaggcttacacgttcattaattggttcgtgtattaaaatggaggtgcaagaagatgcataatggctggtcaattttcttatgggttatttatccatatataatgttggcatcatttttcattggaacatttgctagatttaaatattttcatccctcaattactgccaaatcaagtgaactttttgaaaagaaatggctaatgatcggaagtgttactttccacattggaattattttagctttctttggtcactgcttaggaatgtttatcccagcaagttggactgcttactttggcattactgaccacatgtaccacatctttggttcattaatgatgggaattccagcagggatccttgcatttgtgggaattgcaattttgacttatcggcgaatgacttgttctcgtgtttataagacaagtgatatcaatgatattattgtcgactgggctttattggttacaattgcattaggtctagcatgtactattacgggtgcatttattgattacaattatcggacaacaattagtccatgggcaagaagtctatttgttcttaatcctcaatggcaattgatgcgttcagtgccattaatttataaaattcatgttctttgtggattagcaatttttggttacttcccatacacccggttggttcacgctttaacgctaccttggcaatatattttccgtcgttttattgtttatcgtcgacgcgcaagggtttattaatatataagaagatataataaaagcatcagatttctttacagggaaattctgatgcttttatatgtgcgcccggcatgggtattagctaggcggtgagagtccgctatgggccgtagtagtcggaaccatgagctgaggacaagggtgtccactgcgaggtggaatctgaaggaagtctaaggcaaagtactgcaccgatgaacaagaagtagctataaggctggaactaactggataagactgcatgacaagttaaagtccaacactactcgaagttactttcagtaaagctaccggtgacatggtacgaaagttaatatccttacccggggagatctggcctacacgtttccgacaagaggaataagtttaatttccacagaaacaagcggtgcagtgatgtagcgttgagtaagccagaagtcagccgaggtcatagtagtctgagtaatcagatgaaggactgaacgacaataacttgtaacttatatcggaggtgtaatcaggtgcgacaatcgcagaaaacagaacaacaagctgaccgcttgtcgaggataggtttggaaaaccgaaagtacacaagggcgcgtagtaccgattatggtgaaggtaaaggtatgagtgtcactatccaagacttagtcttggaccgcaataaccttaatcaggcttatttgcgagttaagagaaataaaggggcagcaggcattgacgatatgacagtcaatgaccttctgccatatctcagagaaaataagacggaattgatcgctagtttgcgtgagggcaagtataaaccagcaccagtcaaacgggtagaaattccgaagcctaatggtggagtaagaaaactcggaataccaacagtggtggaccgaatggttcaacaagctgtggcccaaattcttacacctatctttgagcgtgttttctctgataatagttttggcttccgccctcaccgtggggctcacgacgctattgcaaaagtagtagatctttataatcaaggttatcgaagagttgtcgacttagacctaaaagcctattttgataatgttaatcatgacttgatgattaagtatcttcaacaatatattgatgacccatggacactaaggctcattcgtaagtttctaactagcggagtcttagaccatgggcttttcgctaagagtgaaaaaggaaccccacaaggagggccattgtcaccaatactggcgaatatctatctaaatgagttggataaagagttgactagacgtggtcaccactttgtgcgctatgcggatgattgtaacatttatgttaaaagtcaacgagccggagaacgagtaatgcgaagcattacccagtttcttgaaaagcgattgaaagttaaagtgaacccagataaaaccaaagtcggtagcccgctacggttaaagtttcttggcttttcgttgggtgtagaccacaatggagcctacgcccgtccagcaaaacaatcgcaacaacgagtaaagaaagcattgaggttattaactaaacgtaatcgtggaatatccctgacaagaatgtttgaagaaattcatcgaaaaatgcgtggatggcttcagtactactcaattgggaaactaactgactttattcaacgccttgacaagtggttgagggcccgaataagacagtatatctggaagcaatggaagaagcttaaaactaaggtaactaacttacagaagctggggctgtcccagcgtgatgcatatgtcttcgctagtacccgcaagggctactggcgaactgcacacagtaagaccttgagctattctctaactaatagaaaactggaacaactcggacttatgaatatgtccaagacgctccagtcaattcaatgtgattaagttgtcgaaccgccgtatacggaaccgtacgtacggtggtgtgagaggtcgataattgaactaatcaattatctcctactcgattacgattattcgtgatttgttcttgtaaaggtaacaattgcactagctaaaattactaaaattgctcctaaaactagagaaggagttacctgaacaggaaagaaaaatgaagagtaaataataacaattactggaccaagtgcacgaacaatatttgctttaccagctgtaataaactgcaagctagtatagaaaagaagtagtgacatgaaaccattaaagaatgctccgccaaagttaaatgcgactgcttgactagaaatatggctaaatgacgttcctgttatgagagcatagcagaaaagtaaaagagccgaagtaaaatggttaaagaacaagacattatttggctcttcatcactaactagatacttagccacgatattgttggcggcatacattagtgggtagatgaatgcacaaatcaatccaagaaggttatcactaaattgaagtcggcttcctgaaataaagaaagaaccgagaatgcaaagaataattgctaagtaatcccactttgtaatcttttcctttaagaagatataagataggaagaaaacataaactaaatacatccgagcgataagggtaacagtgattggacttaaggttgaaagagcaatatattgaagaataattccgattgcatttgttccacccaaaagccataaccacaggctcttaaggttggttaaagaaacatgctgacgagtaataaggattgttgcaaaagtaaaaattgcagcaaacgcactagtgaaaattcccccaacaaccggactcaagctagtaagtgaaaatttattaagaaccggactaatactactaaataggagagaaatcagatttaattcaattccccatagttgcttctttggtacactttttatattcatttaatcacatccaatactttttattactttaattctaatgaattatattcctaagtctattaggaaaacgattaaatattttagtttacataatattcagaataataactattcaaatttgaaattttgaacaactttatcaaggtcttcttgttcaatccctagatagtggcgcgtatttcgttcagaggagtgattaaataactgcgaaatgatttcaacgttaacacctttcttatagagttgtcgaccaaaagtttttctaaaagagtgtgttccaattttagcaacgattttattattttccgtttttctagccattcgttgcaacatttcgtaaaagccatgtactgaaaaatgaccttcttgtttcccagggaaaagataatcattctcgtctttataattcaagtcattaagataatcaataatttcggcaagacaattattccaaaagagcgttttagccttacctgttttttgctcaataacacgggttttagttttatttagaacatgaccaacccttaacgttacaacgtctgatgctcgcaatccgttattaagggcaattgcaattagtaataggtttcggttaaccaattcaggacgcgaatgcagcttaattgtctcacgtaactgatcatattcttcgagagtcaagaatttaacattttctacccatattttccgtttacccttgatttgaccattagttttatttttgggaatataaactcgttttttagttgacataatatttcttcctttgttaatttgcgaggtaatcaactaaagcagggacgatttcctctccttctttccgcccagtttcataaagtgctcgaattttcttaatatttccttcaatccgcttaattttaattggtttagagggagcaatattaaagatctttccttcacaagacaaacgattaatttcagcagtctgttggttgtagagaaggggacgatcaatccccgctttagcaaattcgggataatctttatataccatgtcgtacaacttctttacagcagaactagatggcttctttcggtagttaatatccctggtccgtacaacaacaatcttgtcatagccttgtcgttgtgcaatatcaaatggaattgaatctgtgatcccaccatcaaggcaaggcccttgagaagtttcctgtggatctgaaagaaatggcattgatgaggaagctttgagggcattggttagctcctcaccaacaggatccgtaaataaaactgtttttcctgttttcacagaagtagcaactgctgtgaaatgagatgctgaccgtcgatatgcagcttcattaaaattctgccaagaatatccgtgatcttcaaaaagataatcaagattaattatttgctttttaaatacgcgagccatcgagatatattggcgatcgtgccgatgatcaatattaatattggcagcgcgtccgtattgcttagagacgaaattaactccacaaagtgaaccagcagaaacgccaattacacttcgaaattcaatatggtgagcgagaaatgtatcaacaattccggcagtatattgtccacggaatgcgccaccttctaaaactaatgctgcattatataacataaaatgaaataactcctttttgtccgccaaaaatagcaaaaatgacctaatttttagtgagacactttttcaataaaattatacaacagtctcacacgaaaatataggattttaaaagcttgttatatcaacgtttattctcggttaccgtaagactcttttatcaaaagagtcttactgattttgaaataacgcaaaagtaggggcaaaaacggattttgcctctcagacgaactgaaattcattttgatgagtagtaggtcgttacaattcgtctcagaagaaaaacgcatattgatatcaaaaaatgagtaaatagacagtaaatatttaaatatgaactttttatgaagaaactattgataatttaagataatcataataaaatagtgcacagttaattgttaaacgtttagcaaaaaaggtaaagaaacggggttatttctatgctagaacgcaaggaacataagaaaatgtataaaagtggtaaaaattgggcagttgttacactttctacggctgcactggtgtttggtgtaacaactgtaaacgcatccgcagacacgaatactgaaaacaatgattcttctactgtacaggttacaacaggggataatgatattgctgttaaaagtgtgacacttggtagtggtcaggttagtgcagctagtgatgcgactaaaaattctgctaatgcaaatagtgcttcttctgccgctaatacacaaaattctaacagtcaagtagcaagttctgctgcaacagcttcatctacaagttcagcatcttcatcaactaacacagatagtaaagcagctacagaaaatactaatgtagccaaagaggatgatacacaaaaagctgcacccgctaacgaatcctctgaagccaaaaaagaaccagctgtaaacactaatgattcttcagctgccaaaaacgatgatcaacaatccagtaaaaagaatactgccgctaagttaaacaaggatgctgaaaacgttgtaaaaaaggcgtggattgatcctaatagtttaactgatgaccagattaaagcattacattaaataagatgaacttctcgaaagctgcaaagtctggtacacaaatgacttataatgaccttaaaaagattggtgaggctttagttgatcaagatcctaaatacgctattccttattttaatgcaagtcaaataaagaatatgcccgctgcatatactagggatgctgaaacaggtgaatatgctgatttagatatttgggattcatggccagttcaagatccagtgactggttatgtttctaattggaatggctatcaacttgtgatcgctatgatgggacggcctcatcacgaagataatcatatttatttactttataataagtatggtgataatgatttttcacactggcgaaatgcaggatctatatttggatataatgaatctccactaacacaagaatggtccgggtctgctattgttaattctgacaactctattcaactcttttatactatcaatgatacaaataatgctattaaccatcaaaaattagcaagtgctactatgtacttaacagccgacaatgatggtgtccatattaataatgtagagaataatcatgtggtatttgcaggtgatggttatcattaccaaacttatgatcaatggaaagctgcaaatagttttgctgacaactacactttgcgggatggacatgttgtacaaatgccaaatggtgatcggtatttagtatttgaaggaaatactggaactgaaaattatcaaggtgaagatcaattatataattggtcaaattatggtggtaacgatcgctttaatattgaaagcttgtttcatcttttaagtagtgatgttgattataaaaaagctatctttgctaacggggcacttggaattattaaactaacgaatgatgaaaagaacccgcaagtagaagaagtatatactccattagttacatcaaatatggttagtgatgaacttgaacgtcctaatgttgttaaacttggagataagtattatctattctcggctacacgtttaagcagaggaactaatatcgatactcttaataaagctaataaagttgtcggagataatgttgcaatgattggttacgtagccgatagtcttacaggtccatataaaccattaaatggttcaggggttgtagtgacagcttctgttcctgccaattggcgtaccgctacttattcttactatgctgttccagtagaaggaaaagaaaatcaattactcattacttcgtatatgacaaatagaggcgaagttgctggaaaaggtatgaattcaacatgggcaccaagttttattgtgcaaattaatcctgatgatacaactatggtattagctaaagtaactaaccaaggggattggatttgggacgaatcaagtaacaataataatatgttaggaaacattcaaacagctgctttacctggggaatttggtaaaccaattgattgggatttaattggtggttatggattaaaaccgcatgatcctgctacaccaaatgatcctgaaacgccaactacaccagaaacccctgagacacctaatactcccgaaacaccaaagactcctgaaaatcctgggacacctcaaactcccgatacacctaatactccggaagttcctttaactccagaaacgcctaagcaacctgaaacccaaactaataatcgtttaccacaaactggaaataacgccaataaagccatgattggcctaggtatgggaacattgcttagtatgtttggtcttgcaggaattaacaaacgtcgagttaactaaatactttaaaataaaaccgctaagccttaaattcagcttaacggttttttattttgaaagtttttattatcgaaaaaaacaaatcctcgttaatcctttaatgcaattgttgtaaaaccttgcgacagtaataacagtggatttgcccatctttgtcagctaacttccgtgcatgcattgcagaaaaagtatagtgctcatgacaaaatggacaaacatattgctttttcccaaatagtgaggtaataaagcccaaaattttctcctccataaaaaaattatacaccccttaacattatagcgaagattatctttatagaaaaggcttttattcatttgtttttttatatgaagtttcactaatttctttaagagcatcacgctgctgtttctggtcaacgtgagtatataaatcggtagcagatgttcctttttgtcccaactgttgggccactaatacttgatctttcgttacctcatacatttcagaagcaagggtgtgccgtaatttatggggagtaagaggatggccaaatgcggttgaatactttttgaccattttttcaattgcattagctgtcatccgtcgagtttgcttgtgataaacggttaggaagaaagcagtatccttttttaaagcgtggtatcgttgtgcacgaatcgcttggtaagtttggatataagtaatagcccaaggagcaattggtaccgaatccctctggccaccttttcttgttacatctagcagcgattgttttaagtttaaatcaccaaggtttacatttgccgcctcggatacccggacgcctgttcctaaaataagagcaataattgcaatatctcgttccttattgaccttataagaggggagagctcttttatcacatttattagggtattctttttcaatgaaagtaataaaatcaaacttcatttgtccccggtacatgtgtgaagccagcgtatgagcccgataatttaatgtttttgtatcattaagggagtcaattttcagcattacattacggtcaaaataagattcaccattattgttatctgcggtaactgttaaaaatttatacaatgaccttaatgcattaatagatcgattgattgaagtaggagaatttaaccgtccttgtgcattggtagtatgctgcaaataatcgatatacaacattacatcgctacgccgtagattcgccagtgtatcaattggtaagtccttattagaattaacagagacgagtccacttgaccgtaaccaatcaaagaatcgacggatttcagttaagtactgataggttgttgtgactgcatggttggtccctaaataatactcgttaacataatcaggaaggttctgaagctcctcttgaattagctttaaatatttatctgcttccatttttatatcctccttgatactaaaaagagtcgcttgaaagaaaactttcaacgactctctaaacctatcgggaaaacaggattcgaacctgcgaccccctggtcccaaaccaggtgctctaccaagctgagctatttcccgttaataacgaacaaatattattctaccaattctcaattaattagtaaaggaatattttaatttaaagtgattaatagttaatgattaaatgacataatagtaaaattcctattaattgcaaaaaaatcatgattaaccgaaatccttttctagcatctaatgaagatgataaataattttattttcgactagttataaaagatacctttccgaaaataatttgacattcaaaatacttttgaatataatttgattatcgaatattttgatactcgaaatattttccgaaggcaggtgaatctttttggcaataatgaatgcgcaggagattatggaattaattcctaatcgatatccgatttgctatatcgattatgtagataaattagttcctgaagaaaagattaccgcaacaaaaaatgtcacaattaatgaatcattttttcgcggtcattttcctaataatcctgttatgcctggagttttaattatcgaaacattggcccaagctgcttcaattttgatattaaaatcaccgcatttttataagaaaacagcttatcttggcgcaattcataaagcaaggtttcgacaaatggtccgtcctggtgatgtattaaaactaaacgttgttatgaaaaaagttcgatcatcaatggggattgtagaaacacaagcgcttgtgaacggcaaattagcttgtagtgcggagcttgtctttatcgttgctgaacgagaagaaaagatttagcacggtgaatcattatcatttataatatattttgataatcaaattattcgggctatagaataaaattgaagggaagaaatatattatgagtaaagataatgattacgaaaaaattaataaaggattaatcaaagtttattccggaattctatggattgaagaaaatgaattgcggaaaagtacattcaatgatttaacaattaaagagatgcatgcaattgatgcaattacgatgtataaccatcaaacaatttctcaagtagcagaaaagcttcatctaactccaggaacaatgacttcaatggctgatcgtttaattcgaaaaggatatgtggaaagaattcgtgataaagatgatcgccgcattgttcggttatgtttaaccaaaagaggccgggtactatatcgtgcgcaccgggcctttcataacatgatggttgaacgttttcttaaaggaatggatgatgaagaaatgaaggttgttaaaaaagccttgcaaaacttagaagattttgtggatgagcatgcttagagataaggattgacaaacattgcaaaatttaagaattactagtactgcgagttatcatccaccccttaaaattactaaccagcaattatcaactattatgaatacttcagatgagtggattaagacgcggactggaattcatcaacgttatatcagcaacactgaaaatacttcagacttagctgtcaatgttggtacccagttattgactaatgccaatttaaaggcaactgaacttgatttaatcattattgcaacgatgtctcctgatgcctatactccttcaactgctgctattgttcaaggaagattaggtgcgaaaaatgcaattgcgtttgatatctcagcagcttgtactggttttatctatgccattaatacagctgaattaatgttgaaaagctctcattggaaaaatgcaatggtaattggtgcagaagtattatcaaaactgattgattggcaagatcgaagtactgccgtattgttcggcgatgggctggcggagtgttacttcaaaagacaactacaacaacccctttaattctcggccgtgatctccatacatttggtgacttaggagataaaattattgccggaaaaacaacgcctaaaactggcttccctaaacaactaacatccctttcaccatttacgatggccggccgtgacgtataccgctttgccactcatgaagtaccacgatcaatcacttctgccgttcaacaagctaatttgaaattagacgatatcgattattttttattacatcaagcaaatgaacggataattacccaaattgcaaagagactggcgcaaccaattacaaagtttccaatgaatattagtgaatatgggaatacagctgccgctagtgaaccaattttattgactcaagctattgctcatgaattgattaaaccaggtaacattattgcaatgagtggctttggtggcgggttaagtacaggaacaataattttaaactattaatagagaaagaagaatggatatgactaaagaggaaatttttaatactgtaaaaactattactgttgatgaattagatgttgacgaaaatcgtgtaacaatggatgcacgaatcaaagatgatcttgatgctgatagtcttgatgtttttgaaattatgaatgagcttgaagataagtttgagattgaattagatgccgatgaaggaatcgagactattagtgacgttgttgatttcgtaaagaaacagttggatgaaaaataatgtactacggaatattatttagcggtcaaggtgcacagcgatcgggaatgggagtcgagcttatggccgactcccttttttcaaggattgttagtcaggcaagcgctgtttgtgaacttgatttgctcaaaattatgaaaaacgagcataaggagttgaataaaacagcatatgttcaaccagcaattgtaacagttagttatggaatctaccgaatgttaaaacgggatttacctcaactaccaattaaagggatgattggcctatctttaggcgagtacgctgctttaattgctagtaatgcactttcatttgaagaaggaattaaattagttgcggaccgtgctcactttatgcaacaagacgcggatagagaaataagtacattagcagctgtccttgatcctcaacttcaagagataaaagaactaatcaccgctcaacaagaaaatggtcagcgagtttatattgctaactataattcaccacgacaaatcgtagtgggcggggcattaaacgctttaaaggctacccttaaaaagattgaagaggacaagcttgctaaaagaacgatcctgctcaaagttaatggtgcatttcatactcccttctttaacggtgcacgtcaacagatgcataaccggttacaagcagtcgacttccatgagccacagattgaagttattagcaatactactaacagcttgtttcattgtgaggatcttccaggaattcttgaaaaacaattagctgttccaacacactttggagctaatgttaaggaattagtcaagcacgcgaaaattgacacaatattggaaattggtcctggaaagacgttatctcgcttcgctcaccaagttgaccagcacttaaatacccaacacattgaaaatcttgctgattatgaaaaatttataaaggagcaaaaagatggaactgacagataaagtcgtttttataagcggaagcacacgcgggattggggcggctactgcattagagtttgctaaggctggtagtcggctaatcctcaatgggcggcaggataacttaccaaaaacgtttaaagaaaagctagatctactaggggcggattatcactatcttaagggcgatattgcaaatgaagaatcagttagtgaattagcagcagcggcttggcaaatatacgagaagatcgacattcttatcaataacgcgggaatcacgaatgataagttaatgatgggaatgaaagcgagcgattttgaccaggtcatcaatgttaatttacgcggaacatttatgttaacgcaacctatttttaagaagatgctcaaaaaaagagtcggttgcattatcaaccttgctagtattgtgggtctccatggtaatacgggacaagctaattatgcggcaagcaaggcaggtatcatcggccttactaaatctattgcccaagaaggagcacgccgtggaattcgttgcaatgcgattgctcccggaatgattactagtgatatgactgaaaaattatctgagcgagtaaaagaacaaattctcagtcgcatccccctcaaccgcttaggacagtcagaagaagttgctaagaccgcaaaatttttagcagaaaacgattatttgactggtcaaaccattgtagttgacggtggcatgacaatttaggaggaactaaatgacaagagttgtaataacaggaatgggtgctgttgctcctaatggtaacggtattcaagaatttataagtaatagttttgcaggcaaagttggaattaaagcgatcaagaaatttgatgccaagtcgacaggaattaccgtggcaggtgaaattgacgattttgaccctaatgatgtcattggaaggaaagccgcgcgccgaatggatctttattctcaatacgccttacaaagtgcgattgaagcaatggaaatggcggagattaacgaaacaaataccaagccagtcgacatgggtgttatctatggatctggaattggcggtttgacaactattcaagagcaaattatcaaaatgcatgataagggtcctagacgggtatcaccaatgtttgttccaatgtcaattgctaacatggcagccggtaatatttccattcactttaatgcgcaaaatatttgtacatcgattgtgactgcttgtgccactggaactaatgcaattggtgaagcctttcgtcaagttaaagcaggtcgcgctaaagtaatgatcgctggtggatcagaggcttcggtgaatgagatcgggattgctggttttgcggcattaacagcattatcacaagcaactgatccgcttaaagcttctttgccatttgataaggcacgtcaaggatttgttttgggtgaaggcggtgcaacacttgttttagaggatcttgagcatgcgcaaaaacgcagtgctaacattcttggtgagattgtcggttatggtgctacctcggacgcttaccatattacatcccctgatccaactggtgcaggggcggcaagagcaatggaactggcaattaaagaagctggaattagtcctagcgaaatttcctatattaatgcccacggaaccgctactcatgctaatgatgaaggcgaatccaaagcaatcaatcaggtatttggttccgatagtaatgttcgcgttagttcaacgaagggaatgaccggccatttgcttggggctgcgggcgcaattgaggcagtcttaacagtagccgctttacaaaagggacaattaccgttgaatataggttgctttaatcaagatccaaaatgctcggttaaccttgtgacggcagaaaataggaacgcctcaaccgcccgttacgcaataagcaattcttttggtttcggtggtcataatgctgttttagcctttaagaaatgggagtgatctatcttggaatttaaagaaattcaaacattaatgcaaaattttgaagattctgatattcgtgaattagaaataaatcaagattcctttcagctctatttaagcaaaaataagcaaacccacaagcatgaaaatcttataacaaccgaaaaaacagagcaaacgacttcagctaagaaaaaagcaaacgaacaactaactttaccttcgcaaaatataactgcgcccctagtcggaacagtctatctccaaccaacccccgatgcagatccctatgttaaaagtggcgaccacgtaaaaaagggggatgttgtttgtgtgattgaagcaatgaaaatgatgacagagataaaaagcccttttaacggaaccattacttcaatttgtgtaagcaatgaagaattagttgaagtagaacaaccgcttttctcagttcaggaggataaagacaatgcctaataaaactttagatataactgaaattcaaaaaatccttccgcatcgttacccgatgttgctaattgaccaagttgatgaattaatccctggtaagaaggccattacacaccgtaatgtcacgattaatgaagaggtttttaatggtcatttccccgaaaatccagttttaccaggagcattgattgttgaatcattggcgcaaacaggtgccgtcgctctcttatctcaagaagagttccaagggaaaacagcctattttggtggaattcggtcagcagaatttcgtaaggtagtccgtccgggcgatacgttaaggttagaagtcagactagaaaaagttcacaaaaatattggaattggtaaaggcattgcaacggtcgatggcaaaaaagcctgtacagccgaattaacttttatgattgggtaggtggtttaatgttttccaaagtactagtggctaatcgtggtgaaattgctgtcaggataatacggtcattacgggagctaggaattaagacagtagctatctattcaactgcagaccgcgaaagtcttcatgttcaactagcggatgaagctgtatgcgttggaactgcccgggcccaagattcatatttgaatgcgaaaaacattttagaagctgctcttggtacaggtgcccaggcaatccatcctggctttggctttctatcagaaaatgcggaatttgcgacaatgtgtgaagaatgcggaattacgttcatcggtccccaagcctcagtgattgacttaatgggaaataaggagcatgcacgggagcaaatgaaaaaatcaggggtgcctgtgattcctggaagcgatgactatattaccaatgttaatgacgctgttgaggtcgcaaacaagattgggtatccaattttgttaaaagcagctgctggtggtggcggtaaagggatccgacgaattaacgatcataaccagatgcggcaaatatttagcgaggcccaaaacgaagcccgactttcgtttaatgatgaccgaatgtaccttgaaaagattatggagaatgttaaacacattgaggtccaagtatttcgtgataattttggcaatgccgttttctttcctgaacgtgactgctcgattcaacggaataaacaaaaattgattgaagaaagtccttgtgtcctagtaaatgaacaagagcgaaaaacgctaggacaaattgcaatgcgagccattaatgcgattaactaccataatacggggacaatagaatttctaatggacaaggaccatcacttttactttatggaaatgaacactcgtatccaggttgaacatacagtgacggagatggtaactgggatcgacttagtgaaggcacaggttattgtcgctgcgaatgaaccacttccctttacccaacaggatattcaggttcatggacatgcaattgagtgtcggataaatgctgaaaatcctaaacaaaactttatgccagtgactgggacgattaattacttatatcttccagtcggtaatttggggatgcgcattgacactgctatttatcctggcagtaagatcactccttattatgattcaatgatcgctaaggtaattgcccttggtcaagatcgccaagaagctattgaaaaaatcaaacgacttttaaatgaaatggtaattacgggcgtaacgaccaatcaaaatttccatttagcaatcctaaacaatcctaaatttttggcaggaacagcttcaacaacgtttcttgaagacttcttcttgccacaatggaaaaaggagctgacagcgtgaaattatatgatcaaaataatactttaagtgaacggcacatcaaagcagataaaaatgctgatgaaagggtcccagatcaaatgtggttaaggtgtccacattgtcatcaattactattcgccaagcagttaacacaatatgctgtttgtcccaattgtgactatggattacgaatacctgcccgccatcgactctcgtggttagtagattcatttaaagaattcgataaggatctccagacaaagaatccgttacattttcctggataccaagaaaaaatcagcaaacttcaaagacaaactaagctgaatgattcagtcctaactggtgaagcttcaattaatgatcagctattttcactaggtattatggatccaacatttattatgggatccctcggaactgttaccggtgaaaagataacgcgcttatttgaatatgcaactatccatcgtcaagcagtagtactattcactgcttcaggcggggcacggatgcaagaaggaattatgtcgctaatgcagatggcgaagatttcacaagcaataaatgagcatgctgctgccggccttttatacattgtgatcttaaccgatccaacaactggtggagtaacagctagtttcgcaatggacggagatattattctcgctgagccccatgcacttgttggctttgcaggccgtcgagttattgaacagacgattcatcagcaaattcctgttgatctccaatcagctgaaaacatcctgcatcatggatttattgatcgaattgtaaaacgtcaagatgaaaaaaagctgcttgaatggctattaaaaacagggagcgttgctaatgaatgaacaattatcagcaagcgagattgttaaacgtgctcgcaatgacaataaaattacggggatggagattattcaaaatgttttcccagattttgttgagttgcacggcgaccgggcaggcggggatgatcctgcaatcgttggtggaatcgctactttccatcagcaagcagttaccgtcattaccactgatcgaggaaaaacaacagaagaaaaaatcataaagcattttggctcaccaatgcctagtggttatcgcaaggcactccgcttaattaagcaagcagttaaatttaagcgacctgtattctgttttgttaataccgcaggagcatttcctagcaaggaagccgaagaaaatgggcaaggaagtgcgattgcccaaaacattttacaaataagtcagcttgccattccaattatcacgattatttatggtgaaggaggtagtgggggagccttagcattggcatgtggagatgaagtatggatgttagaaaacagtacttattctattttatctcctgaagggtttgcctccatcatgtggaaagatagtacgaaagcagataaagcggcagaattaatgcaaatggtgccgcaagctttattaaaacaagggattatcgaaggaattattccagaaagcgaagagcatcgtaaaacttgcaaaaatatcgagcaggttttactaaagcgattaaacaagctgcaagaattaccgccaaaccaacttctagcaaacagaaaaaaacgttatcgaaagttttaaggaggataatatgggaaatatattaacaggaaaaaagatcgttgttatgggagtagctaataagcgttctattgcatggggatgtgcacaaatgatggctgaacaaggtgcccaagttatctatacttatcagaattccagaatgaaaaaaagcttacaacggttagtagatgatgaagatcaattaattgaatgtgatgtagcagatgatgaaagtattgaccaagcctttacgattatcaaggaacgttttacaaaagtagatggaattgtacacgcaattgcttttgcaaaaagagaagaattagctggttcaatccttggtgctagtcgcaaaggttatgcaattgcgcaagatatttcgtcttactcccttattgctgtcgctaaggttgctaatgagttaaatctattaaataatcctgcaagtattgttaccttaacttattttggctcagaacgtgctatccctaactataatgtaatgggaattgctaaagctgcccttgaagctagtgttcgctatttagcacgggatttaggacaaaaacgaatccgtgttaacgcaatctctgctggcgcggttaagacattagcagttacaggtattaaaggtcatgatgaacttttaaagatgtcccaagcaagaactgttgacggagaagatgtgactattagcgaaattgggaatgtgtgtgcattcttaatgagcgatttatcaactggagttactggcgacaccatttatgttgataagggggtacatttgatttaaaaatataaattttaaagactgagaaatgagtttttttcagtctttttgctgtcttttagaaggaaaacataacaatagcaagaactttttttaattttttctaaaaagttcttgctattttatagctcagttggtattattaataacgttgtgaaagacgagttaataattttgagaaaaattgtttaatatatttaaaaatggcccgttagtcaagtggttaagacaccagcctttcacgctggtatcgtgggttcaaatcccgcacgggtcacttttgcggaagtagttcagtggtagaacatcaccttgccatggtgggggtcgcgggttcgaatcccgtcttccgcttagccagttctattatgccggggtggcggaattggcagacgcacaggacttaaaatcctgcggttagtgataaccgtaccggttcgatcccggtcctcggcactatttcgggaaatagctcagcttggtagagcacctggtttgggaccagggggtcgcaggttcgaatcctgttttcccgatctggctaaacagctaagaggtaatcttcttagctgtttttttggatatctgtcaactggtatggttgactaaaaatttttttagtgcgcccggcatgggtattagctaggtggtgaaagtccgctatgggccgtagtagtcggaaccatgagctgaggacaagggtgtccaccgtgaggtggaatctgaaggaagtctaaggcaaagtactgcatcgatgaacaagaagtagctataaggctgaaattaactggataaggctgctagacaagttgaagtccaatactactcgaagttggtctcagtaaagctaacgatgacatggtacgaaagctaatattcttacccggggagatctggcctacacgtttccgacaagcagtactaacgcagccattaattagttttttgaaataaaataaacttttttgaaaaaagtattgctttttataggataacttgataatataatattcgtcgctgatatgcgggtatagttcagtggtaaaaccacagccttccaagctgttgtcgcgagttcgattctcgttacccgcttttaattaatttaatatggcccgttagtcaagtggttaagacaccagcctttcacgctggtatcgtgggttcaaatcccgcacgggtcatttttggaggattagctcagttgggagagcatctgccttacaagcagggggtcacaggttcgagccctgtatcctccattgaacaattttaatagttgttcaacattttaatataattgggctatagccaagcggtaaggcaacggtttttggtaccgtcatgcgctggttcgaatccagctagcccaattagtctaaaacagtgagtaaaaattactcgctgttttttattagaaaaaataggcaatctaataacgtaggctaaaagcgaacatcattggattgcccaataattagcataatttattcacgtcgtaacataatatgccagacaaagaagccgactccaataattaacgccaaccatgcccatagttgcaatggaagatagatagtacacgttaacaagcctaaaacccaactgattagcatcatcgataatccagcaatatcgccacctaaaccatcaataccacaagtagcgatatagacgattcctgatgccagatataatagcgaaacaattaattcggctgttccggcataaataggaattgcaggattaggattcccaaaacctcctcaagtcttattctacccggatgattagaatttataaagaattacagtttttctatttacaaatagagcagggggaacaaaaaatcaaaccagaaattatcttctgatttgattggatcttatttagttgtatcttttacttttttcaaggcttctaaaaatacttcataaggttgtgcaccagtgattgaatacttattattaatcacaaatagcggtgcacttggcattccaatcataaatgcgcgccgttcattttttcgaacttcatcttcatactgattagattcaagaacttttttaacatcagcaacaggtagtccgatttcattcattgcaacagttagagcttcatagtccgcgattgattcattatcattaaaataaagttgataaagacgtttaacagccttattaagtaatgcttggtcatttaaactctcaatgtattttattaagcgatgagcagctaatgtattaacaggaatcgcattttccatcttaattggtaaatcaatatcggcagcaagttgatcaattttatgtatttgtgtaacagcttcttgcttagttagttgatgagtttttgcataatattctgtcattgataaatcagttgttgttggcaacgttggatctagttgaaatgacataaattttaatggtgtctgatcggcaatctttaattctttaagcgcccgttgtaattgtgtaattcccatatagcaatatgggcacgcaatatcagcccagtattgaatttccatagatgatcgctccttataaatatatattaatttaatctaatcataaaataagcgaagttgctagtaaatacgtaaagagggaacgatttattttaaaattaacatgtcattaaaattatagttttaatgcgactgaatttaaaattccccccagaatatcaatttttagctttctcaaaagaatttatttaatgcttatttttaactttaataaaactttttctaaacaaaactaatacttttgatttatgttttaaaagatttatgtaatactattgatgaagtctatgtcaaaagtattttaaaaggagtttttatcatgaaacatacgcttaaagttgatcaagtacgtgacggtttatggctagattcagatattacgtatacgcaagttcctggatggcttggtaatacaacgcgagatttgaagctttcagtcattcggcattttcaaactaatgatgatacacgttacccagtaattttttggtttgctggtggcggctggatggatactgatcacaatgttcatctgccaaatttggttgattttgctcggcatggttatattgttgttggtgtcgaatatcgtgatagcaataaagttcagtttcctgggcaattggaagatgctaaggctgctattcgttatataagagctaatgccaagcgctttcaagctgatcctaatcggtttattgcgatgggagaatcagctggtggtcatatggcaagtatgttaggtgttactaatggtcttaaccaattcgacaaaggtgctaatttagattactccagtgatgttcaagtagcggttcctttttatggtgtagttgatcccttaaccgctaaaacaggaagtgcatcaaacgattttgattttgtttaccgtaacttgcttggcgctgaacctgaagctgcaaatcccctcacgtatgtaaattctacttctacgccctttcttatctttcatggtacggaggatgtcgttgttccaatcaaagatagtgaaaagctttatgatgtattagttgaaaacaacgttcctactgaattatacgaaattgaaggtgcaagtcacatggatgtaaaattccttcaaccacaggtatttaaaattgtgatggactttttagataagtatttaacccggccatagatcatttcttgcctttactactaaaaagcaaactaataacaatccaactttcacattattgacaaaatcaaaaagcaccatgaaattactttttcacggtgcaactattgttaatatttatctacttggcttccatcaatggagaaatagacaacttgatttgcaaacctaatccagcagcatatttatttaatgtaggcagcgtagggattgaatctaaattctcgattttagccaattgaggttgtgtcataccgattttttttgcaaattctgtttgcgaaatgccctgtttaattctttgtacttctaaaaaagacaaggtatcaacaatcgataattcttcttttgttgcagccgtctgatgcttatctatatcttcccattttctcattatttacccttcctttcgtaccaatcgtcaagtagcgacaaggctctttctatctgacgaggatctgtttcatcctttttcttagcataatgatttaataatacaaaattatttttcttccatactccataaaatactctttctggcataggtcgtaactcccatagttgatgcctataaccctttaatttttttgcttgtggtgtatgcaacacaggaccaagagcttgtaacatcttaatttgatggcgcatttttaaataaattgctttatcttgcttttgtttactttgcgaaattttctcgaaataatcaccaatttcactatttccatttttatcttcgtaaaaaactacttcatacatgcactatttcctttattatagcttatttattactaattatagcaagattgctatagctttactactattaaaatatattccataatcaaaaatttttctattgaaagcacccgcacactcaattaaatcaaataagtttacggcaatgattatttttggtgcacaaaaattgccgatgttccccagctttacaaactttcaccatttcataccattttaactaaacaaaagctccggtaaaatgccgttatatcagcattttatcggagcttcttttttatacaatcttaaaaaaatgcgtcccccgagcatagaagattgttgatatatcaacgttttgaaggagttagtgtgccaaacgtgtgcgaacttaactaaaataaaaaagagcgcctatcagggcgccccacgttataccggtacggatcaagtaacgaactgaatccaatttgcgtgccgatacttctcatctgatatttaaattataacataattattttatgatacaataattaatgcgtgtcgggagtaacgacccaaactatcacgcaaaaggggtgaattccccgtgacatttatacttctcattctgatcgtgccgaacgggctcgtcaagcaactgatgcattatgcaaaggttgtaatcaaaaaggctctcaaacatctaattgatgaattacttggttaattctgataggaaatgtgcgagatgctatttcagcggtagtgtttgctatcgctgttttttattatactttaagaatatagtcatggtatttttttaccttagtaactattcagtttaatgttactctattaaattttgaattcctttacatccttaacctctatcatattacaatctttatcttcaacgtagacgaattctgacatatcatcaatatcattgaaatctttattagctgcgagttctgcagcatccttaaaaaaattaggccttttttcttctattttgtccatcggtactaaacattttaatatgtaagttttgaaatgctcttgttcccatcttgtttgaagaggcccttttaatggcctacttctaatattatctaattcatatatggcactatcaaggtaccttaaaatttcaggacacttataaatgcaagaataatcaaaatgatatggtataaaaaagccactaattccgttatcattttccaaacgtgctgcaatatcattccaacttccaccagattcaatcaggtatgagtgcccattatatgaaataaaaggattattatttttacagtagaaacgaatattatttttttctaaaaatgatcctaacaaggtactagaatctgttataactttgctaagtggttttaatccatcatataaatagttcctttgctgtgaagaacaagttgtaaagtggtaaaaatatgcattttcaatttcatcttttttatatagttctaatgatctttcagccatttcatgagtcgataaatcaaatatcttgtattttttcttttcagacaccatggttttctcctttttatgatatatctaatttagattactatatgacaaaacaccctagcaaccattaatcggctactagggtgtttattactataatttttcacttaaatctgaattgtttgaccaatgaaaatcatattaggatttgcgatgccattcttttgagctaatgcttgccaggtcttgccaaacttagccgcaattccgcttagtgtgtcccctgcttggacagtataagcattggattgtccgttgccggctaagtagagtttttgcccaacgtagatcacattcgggttagtaatgtgattacggcttacgaggtctgagacagtggtgccgaatttggtggcaattccggataacgtatcgcctgattgaacaaagtaagtattttcgtttgatacttttccggtgactttgaggacttggccgacattgatctggtttggattaccaataccattgattgctgctaggttctgataagtagtcccgtatttttctgcaattccactcaatgtatcgcccggctgaacaatgtaggttccagtagctgggtgaccaatatgttgaaccggctgtggtgctggaataacagcttgcggaacattgcctgatactaaaccagtcgtaaaggcaccgtcaaagtcataactagtatcaattcccatgatgctatgatcagaatattgccaagcacttgcattatcaatccccagttcagtcacaccatagccagcaatccaaatcttccgggaatcaaagccatgtgaattaagaataccgccagtgaagaaggacttcatggagtaaatcccagtattcttgtaaccaagagcttctacttcttgaagaaaggctaaggatactgattgataatctgcagttgaatgaacttccgcatcatcaatcatcaaagtatcgtcatacataccaaattgcttagcgattttaacgaagaatcgagcttcattttgtgcatcagtcactgatgtataacgagcaaagtggtaacaggaaacgcgcaagccaaccgctaaggcattacgaatttgagcggccgcacgtggattaacataagccgaaccatcttcggacccttccgttaacttaacaacgacccctaatgcaccctgagctttagcagcttggaaaaaggcaacagtatctggttgataacttgaaacatcgatgaattgattacgcatattattcttcccctttcattggatcgattgctggtgcttggccggctggaatagtagcgggtttagttggttgtgatgtcggatcaacggttggtgtcaatgcagacttttcataagctgattgcacaagcgtttcaatagcgttaaggtcaatattcttaataccctgcttttgaagtgcttgttgaacaatacctgttgcttgatgaaatttctcatgaccagccatgtctttgccaactaaggaagcaacggcattatctgcaagtcgttcagcacaagaccaagcagcacgagaagtttctgttttggcatgagtgactttagcgtgaataaatgtctggctttgctttaaggcaaaataaaagaccgttgagataacggccgtcatgatataggttggaattgcattaatgattgtgctcatgttgtttctcttctttctctacataatctttgctgagcttgtaaatatgattctttacccaagatggtaatggtagtcccatttggccccagttttcgataatcgaaactaggtaaaataggaaaaagaaaaagacaagcgagtcgcctgcctgtcctaatccgcataattctaacattggataaacggttaaagtcaaaataataactgcagcatgtttcaaaagtccacccgttcctttactagaagttgttcggtgcgtaatgatacttttgaaaaaacctgtcacaatatcaatcacaatcgcccaaactaaccattcaatgagcacgttgtcaatcatgctggcaaaatattgaatgtatagaacgtgttgtggcggttgtgtcagtagtaagtgcatttatagtggtcacctccttataagggtaaaataaaaacgccctgtagaggacgtttaaaattatttaatttttattaaaagattcccaatttccatcttcattattattgattttaattattaagtcgttaagtttattatcaatatcattagctagcttatacgcacttgaatcacctcgtactctagtaatttcatatatttttccttgacgaagttcttcagtcaaagatttaatattatctatttcgttagaatatttctgtttgagattcactttatccccatctccttaccgctaaaataaaagtgttatattacgctgttactaaatatggaatattattatcagataaccattgaactgcattattattaatttttacaacatcatctaaaattttatctaaattaaatgaataaccaaatataaaaaattcatgcttatgaggatcgtatactcttaaagtttcatcttttgtaggagtgaacactttgtctccaacttttatagtttgatacaaattaccaattacttgtttttcaaccattatgtgctgacgtcggttaaatttaataagtccttcatcaatatgttctaaactattcctgaggcctcttaaattttcattttcgaccctattaatatagaaatcatcagttacattcaaaatttcccttaccttttttcgatcattactatttttagagttagaaccccatagaagcttagctatatctgacgtatacaatgcaatattttgtaaattataccaaatcatattatctttataatatttttcatgtttggtattatatatatttttaatagcaataatagtaaaattacataacagataagtttcactaattgcatactcctcgtctttactattcatagtataatgttgcataatatttaccattccccttattaattgtttagtaatattatcgtatcagtaattgaaataattatgatattattatgaaaaattgaagaaaaaccaaaggctaataattaatttacaaaagtatggaatcaaaattttaataaaatgccgcccataataaaagccccgctcgtttgagtgaggcttatttatgtattgtgtatttctaaggcgactataagtaattaccgttaagctaagaattcatttaattattagccattttctttagcttttctttatcttcaatctgatacaagcgaatcttagtaattaatccctgatacgcttttacttcattgggaaaattattagcaggagtaaatttatcatcttcttgggacaattcagaaacatagaatacatttcgataataacctatataaagtttatggttcagtttcctatataatttatttttttcaataatttttgcttctttaggagtataaccatcttgttttcggtcaaaataggcttcccatttaatgcactgttcctgtgaattaatccgatttgtttttaaaccaaatgctgctaatggatacccacctaatttgggattgttacacaattcattatcatattcgtaagcagtattaacaatatcttctaatgattttgaaatattcaagataaccacctctattttatagagtatcactaatttagactactaaacaataacttaaataattttattgtcatgatttatgctccttgaatttcgtaattctgaccggttaccgtcttatattcatctttagtgatcgctccgcatcgtacataaactttgtagaattctaaatcatggttaccccagtcattccaaaacatttgaagcatttgtaattgtgtcatcattatgccgttacctccttagatttttcgactgcctgttgctgattaacagtcataaacatttgttgtaattgcttgatttgagttgcttgttgagcattagtagcctgcaattttgcatttgattggttctgttgcataatcattgcttgcaaaatagtgatttgttgattggtattcccgtttgaatgcgaaataatcgtcacaggaatttgactatcattcataataaagctctccttagtatatttttgtttgataaaacactgttacagttacccctgtattttgtatagctgagttatcaatgtttctaacgattaatccatcgccgtttccagcttctgaaacactcaattgccagcggtcgccttctgcaacatagttaagtattttcccagtaactccaagttctttattgatagcatccattggaagtgtcttgacctcttgcgaattaagttgatcaatagctataaatttagtaatcgtctttaaattagaattgtaatctgtttgatgatcttgcaaactcattcctagcgatgtattgcctaaactaatgagcgaagttggcgttttatcagcataaattctcccagcttgaaaatgggctgagttttgatcgtaaaatttaactccagtattaaaagcctttccacctaacttaaagtgatccacatctagatatgttccagtcgtactaggcccaatatatagcccattcatgctttctctttcagctcctagcataatctcgtttgctgtaaactcagcgttagtttgcagagtgagcaactgatcgcattttcccccaagtgcaaggtaatcaatgtggccctttgatagcataatttttagattagcttgtccacttttatttgtaacaaaatggctttcccaatgtttgatagttagatcgtaagttgaatcaatcactgatccaatagcattgtctgctatatcaaacgtttcctcccacacaaaagaatattcaccgaaaccggattgttgcgataccgaatgctgatacaatgtttgatagcaattatagttccaaagtttgattttgatcccaatattatgtgtgttatctgcatctgtaccagttacgtttaatatacatcctctgaaataataccctttaatcgaaatattactatgaaacatggtatcaaaagaaaccccatacttagctgcacctcgctctagcataatttgaatatcattttgatttccatttctaaatttgaatgcaatttgatccacgtttagtgctggtgttaactttaacctcaacgaaatatgagactgcttcaagtcaatagctaatggactttcaattagataacatccattcccatgaacacttttattattatcaactgcataggttagaatgctttgaaggatttggtaatcatcatttttaccatctccatgtgctccccatgtttcaggtataatttcattttcaataagttccgctaatagtcctgatgctaattgttctgcatgtttagttgttgtatctgtgacataaaaaagccctcctcctccatcatttggttcataatagccaagagttcttgcgcacatatctttgcttaaagcactatcagctttcatggcagctacatttggatacacatgtgcatagttaatcgcaattgccttcatcatttcctgcttaaacgcctctgcttccgcctgggtaaacaaattgtcttgcttaatcttagcgtctagtgcatctaaaccattttgaacagtaacgccaagagctttgagcgtgttcattgattgggtaaacttatcaataaagtcactggtcatcttggtgagcttgtcggtactgtcttggtacttggcttcgatttcgttaattaactcttcgacgggtgaaatatatgttcgtggtaccaagccatcaatgaccttatcagcaaggacatcgaggtcgaattccaaggtagtgatagagttaccgtctttgaggatgcgaaaaaaggcttggcgataggaaccagcgactgtaaaggcatggccgggcatgtcgaaacggaaacgtccggcggttgggtcaagggcaacgtagcctttatcatcaattactcggaagtcgccggcggaattcttaggaagtaatccttcaaaccagacgttacagccagttaaatctagtggtgtcccgtcttcgttcttaatattgacaaaaacttgacgcatacttcgctcatactgacgcgcttggacccagttagtattactgccatcaaagttaaccttgaagtcttgtacattgtcaacatgcggacgccggtcttgaccgatcacataagttaaagtttgtgacattaaatcattcctttctctttcaaaatctgcatgacagcttgttcaaccgtttcatagtcggtccctaaagccacatgctcaattttctttttccacgcttcttgagcctcttttagttcatctcgcgtggctttttcttgttcgagttggtcgagacgagtattaatctcctcgagtagcctaatcaattctttatactgcctgtcacggagattatcgtctttgttatcctcattttgaattatcgttaaattatttattaattgctggcggaattttcttccactctgcaaatctagattagtttctaaatccaaatgaccatccccctcctcacttcaaactactccaatccgtcactctgtaacctagatttacctgggcccgtgatacgtatgctttatcagatccggaaacattaaaaaccagccttcctttagtagtgccggctggaattttaatgttaactgtgccggcggattgccaggcgccattattgacgatatagacaatattcgatttgccggcagaactaccatcgctcttcaagaactcgacataagtagtagcggaacttgaattatcggtcgcatttaacttagccatgagacgacttgagatggaggagacaccgttgaggttaaattcattgcttctgagagtgccttgctctacttcaattactggactgtcattatatttttcgctggaaacagttccgccagtcatcatagttaccaaattatgctggccattttgcatccagtaaatattctggtctactgcttccatattcttatccgtctctttcttatcattcacgacttgcgttaatgacttggattgctgatccatgctatttgctaatccactaatccggagtcgttgttcttcaagagcttcttgtagacgtttagctttctgattttgataatctaaaatagttgtttttgaattatttaacgttatttgattatcttgtcccttagcttccggatatatcgtataaccgacagtcttataactacctgaatatttatctcgcgcaagtactcttaaaatttcaccagcaacaggtacaaatgaatttccctgaagcgtgacttcaatatttaaatctggatcaggtttaagagtagttaaggcatatttacgcattgcatccgcatcttgaaatctttcatcaacaagatcaggtccaggatgttctccccattcgtcaattgacttttgatcaactaccataaacggttgaaaataatactcttcctgtgattctgtggttgtatcatttccgacagtatcattggtttctttaccaccgataccatcacgaataacttgtaagggatcaagccaggttccatcatttgaccaggcacttttcaatgcagtcattaaattcttttgcttagtaattccaatatgaagatggctagtatcacggtggccaataacatcccccgtcttaatttcttggccaacttgaacagtaatatctcctcgattcaaaaatgcttcttggtagcaaattaaataatcattcgacacaatagttatatagttttccagtccagcaatgtatccaatatcctggactttcccaccatgaatcgcatgaacatcgcgtccaggatgatcgacagaaccaaaatcaaggccatcgtgaaaaccattagttcgccccactccatcttgagggtgtgttccaaaagtttgccccaatgaaaaatgaccttctccaacatctgggaaaggccatccccacggattaggtggtgaaatgatcaatttatctttcgtgattggggcaccatgaggactccaaccagtaacaccattaatttgtcctagtgcattaggaatattgaagaacgcaattaactggtcaaaaccctttaagatatttgtatagggctcccgacaataagtattaaaagttcctcgcttaaattgaagtaacccaagcgccggaccagaaccatcgccatcgggatcagttcctggttgcggaatcgtctcgtttccacctgattccaaatgaatttgtgcccgtaaaacattaagctgctgagcattcggttttattccataaaagctagcagcatactgaataactggtgtccaatcaccgttgactggctcagttggtccattagcattagttccacctgtcccggtataaacagtgtgctgaacctcatgcttaccaccaacacaacgaatcatattaataattgattgactgtcccgagtagttttaactgactttgcatcccttggaaaatcaatcactcgaccattatccttatagaactcatcttctgaataaactcgtatcttcttgttatccggatatataactgcacttggccataactcagtaatcttactaagcatctctttaccactgccgctatcgaacttagaagttgactgcttatcaaaattaccatgaacttcatagctaaagcctagcttatttccatcaatccaagcctttagtaagtcctcaactccataagactgatccttactagcattactatcctgattgttatttaaggtaaggtcacttcgtttataaattcgactaatctcattatagacatgccaagcagtgatatttttcgtattagtatcaaagttttcaacacaattttttacaatatattcctgtccctcaagcacaatcgaactttcaacatctaatggatcatacaatgctgaatcgtaatcaaatactgaaaaagtcaattgaaaggtcgaattcttagaccactcgctttgcattgttggccagagaataatgtctccgattggctccttagttgtctctttatgaggtgtcatcaatactaaactaattgtcctcacctcctaaccaagatacataaatgggaaactgaatgtaatttccaaatcatctgcaccagtaacttcaaagtcattctttccaggcgctaaagtaatatacccataatcggtattggcactgtctgggttattattcttaaatgttcgccgtccctttagcaagagagtatcgtttccagatagattttgattgtacgtccaagaagtattagtagttgtattctttactgtgaattttccaccattatgcttaatagtaatttttagatcatgacgctgttcaacaggatcgattgtaatatcactatcgttaaggatagaaaacttattctggcctttgaaatggtatgaaggagtttcctcatccatgttcatattcaagtctaagaaatcctcatctttcatctcatccgtatgcaatttactaaatcgcattccgcttggattttcaaaaggcacttcaaacgtacaatagttaacttcttctggttcgcttttaatctcaaaggaactagcccgacagtaacggacaatatccggctcaactcctgttcttaacctaaagattcctttttgtgcaaaaacgcgataaatctcatgctttgccatcttaaaatcttttcgatcaaagaactgcaataagaacttagcggtgatcgtcgtttggccataacgggaataactccaaatttgaccatcttgttgggaatcatcacgataattattaataacactaggcgattcagttaagccaagaaaagttaagtggtcagtaatatctgtgctggccacttctttttgatcatcaattttaatgtaaagaatgtttacagcgattacgaccacctcctaaagatgttgattatcaaataatgcttgatcagttccttcaatcccataaaactggttcttgtcaaaggcgccggctttaattgcagaaagttgagctgcatttaagcccagcattgtcccaaagcggttgagcatctggtccatccgatctaacatctctttttgcattccattattactttggccaccgttattataattatttacaacttgggtgctttgcatattgggcttaaagttagttaataccgaaacagcatcatcagtaccattagcatattgtggtaagtgcttaaacatcttagcagtatcgctagctttaacaacttttgttcctcgtggtgctggaaagactacattacgcccataaggaataaatggtgtttcacctgggaattgaactaactcacgaaagacggggccaggttgatcattaacttccatcaatccacctttatggtaattagttccctgagcatgctttgatttatgaaaaataacattaactgttttctcaatagtattaggtatactcataaaattatggattgcatcaagtgctgttttaattggcccagaagctttatcattagcttttgcaatttttgctggtcccgtatttgatccagcaaaagcatttacaccattgcgagcactatacattggtccactagcattatcaacggctaaagcatttttaggagcgccaggatttgaactagcaaaaacatcgacaccaccagtagcatttctcatcggaccactagcattgtcaattgccagtgcattctttggttctcccggattagcatgacgccaagattgaagggcatcgttagcagcttttagatttccactagctttatcatcagcaatgatttgttttgcagcactaaccggcatccccttccacagcccataatcagtgatcagttgctgtagttcgggtccacccttagcatttacgattgcttgctgttgcttaggactaagttgattccagcgaccaattttattgagcgcatccattaatcgaccagcaccctgagtagtaaccaaagcacgttgttgcttaaacgaaagactattccaaacaccagcctgcactaatgcatcaactaattgtggagttcctttagcgtcaataatcgcttcctgttgttttaaggttaaattattccactgtccggaactttgcaaggcttcataaattggcttagttgccttattagtaattactgcttcctgttgttttaatgacaaggaattccatgcaccggattcaagcagaatgtcggccatttcttgcttacctttagccttaacaattgcttctttggtcttaagatcaagattattccattctcccgacttctctaaagcttgaacaattgtttcactaaagccgtctttcaaccaagctttctgctctttccaactcatgctatcccatttaccattttcgattaatgcagctgccaccatttgttgagcattggtacttaacttaccttcctttttcagaagtttaatttggttccattgatctttagaattaacagccttattaacttcctcctgggcattagtccgaactttaccagttttgggatcgaaaactaagtcattccacatatcagcggcttttttagcttttccacttaatttagtagtatttaccgctaagctttgtaggtttgtttcggcagctttggattgccgcttaatctcatcagtgccatctttataactaagtcccatactttttaggtcattcttaattaatttagtactttcaccattagcacgggccaggcgaatatattcggcagctgctttattcgtgtaatctgttaatgctttcttattagcacgcataccgaccttatacagttcagaatcttttccgtagcgtttagcaagcattgaagactgcttcttgtattggttttccatttcagcagtttcactggttatatctcccatttttgttgagcgttgttgcatagacatatgcttaatatcgttattaaggacagccattgctttagcacgcttacttccacttaatttaagaattttcatctcatcgttaagcatttcctgctggttgttctttaacatgactcgctgagtatcatttaattgtgaaacttttttattgtggtcagatagaattgtttgaacacgctgattggcattatctgcatcattcacatatgaattatattgttttttctccttttctaactcatcgtcaatagctttagatatttctggagacagacctttttctgcctttttggcattagcaaaatgttgttttgcactattttcaatattagtaaactcacggtcaaaatcagcagctaatttctttgttgaagttgaggcagcaacatccatatctgacagagtgttctgaattccttgagaagtcgactgcatttttgataaagccttatcagcagctgcaccaacatcagatccccaacgattcgttcgttgtgatgattcgacagctttcttaccccaaagctcccaaacagtaattccaccggcaatggctaaagtagcaactccagcaacagcggcaactgttcctaaagatactccagccgcagcagtagcagcacctgcttcacctgcagctacaccggtaccttgtaaagcgacagtcgcagcaccaacaccgttagcagcttgaaccgcccgaccacctgcaccagtcatggttgttccaaactttgcagcttgaaatgttgattttgaaaaagctgagccaataacgtctaacccactggctcctagtttcattgcagtttgtacacggccgattccggaagcaatttttccaaaggcaagaactgtcttcccagcaccactagtcagtttacccaatgctaggaacaacgggcctgcaccagcagtgaacagggtagttgttacaattgccttctggacagctggtgataaatcaccaaagccatgtgcaagtctggaaaggccttgaaccattggaataatagatggtaagacgtactttgccatatccattccagcgttagttaaagattccttgaagattgctaattgtgctttaggagattgaaggtttttctgtgacaagtcgccgatataatcccgcttggcagagttttgaacttctttattaagttcacgtaaccgattagcgttttcggttaaaattgccccagcttgttgtccagttgttccaaataacgcatgaaaaatatcattcttttggtgaccagataagcctttcatatggtcatttaacgtcttaaaaatagacgacattgattttaactttccactcttagtaagaaaatctttagtacttaaattaatacttgctaaagctttttgaccattagcggttggcgtaattagtgaattgataacctttcgtagaccggtaccagctttgtctgcttctagaccattattagacaagatccccattgcactagcagtttctgagagactaaaacctgcttgatgagcagttgagccaacatatgacattcccacaccaagtgattgaaaatcagttgatgtggcatcggcagcataggctaactcatttaatgttttagtagatctacgctgcatgactgtagcattcttgattggacgtcctgctttatcagtagccagtccaaaagattccattgtctgcgaagcaactttgattacatcattaaagtcatccccagtggccacagatgctttaagttcgttccgcattactccaattgctgctttagatgtataaccacgctttactagatcttgatacccggcagcaatcttttgctgactaacaccgtactcgtcagaatactttcgggcatctgcagtcatcgttttatatgcggcattcgtttctgcagctgattctccggaagttcgaataacgttcttgacctttgtcatttgatcttggaagtcaacgagtttcttagcggaatatgttaaccctgccgcaattggagctgttaaataagtcgacatccctcgaccgacacctgatattttagaaccaacattggtggccacatttccaaaatgttgagtgcgattagcaagttgtgtccacttattcgactgcaattcaatatcacgattaagagcttgcattcgtccacgtaattgttcaatttgcgcagacgttttattatattgggttgctgccttagttcgtgactgctcgctcctggtagtatcatccattgctttcttagcattctggagttgcgcattataattgcgcatttgttgactcatagtcgcataagcagcacgcatattattaatacttccaccggatgctttcagtgccgcttcttgcgcacgcaaagcattggctgttgatttaatttgcgcttttaaaacaccattagccgctttaaacggatcaatatccaaactaacagttgctgccaaatgtcctaatgattgggtcattatttaacctcctttcctagaataagaatgggaatgctttatcaatggttgtctgcttttcttcaaagacgtaattcattaatttcaaatctgaaagtgttagcttactgacctcattccatttatatccatcgcgcattttatttttaatgaaatctgtgagactcttgattgaatcatcaatcatctcaacagttatttttttggcttttcgttatcctttttctcttctaagtcatcttcacttagaggagaaccgagagtttcattaattgcattaacaatgctaattaacccttctatagccgtaactcctgaaagaacatcctttttagtcaatccattcttccaaaaattagcagcaaactcagcccgtaaacttaataatcgttcattatctttatctgttggcaattttttgggatcagagtacatcactatttcttgacgttgaacctttaatgcatctaatagattttcaagcattggggcttcttttcgttcatagattgtttctttgccatctgtttttacttttaatttatatggcatttccatatcctcctcatcgtctcacttaactcgtctctgtctgattaattagttaccctttatcaacaacagtttctggtttagtatcttttgtattggttggatcagttactggagcttcttccccaaagaccattgcatggaacttagcaaaatcaaatccttcattatcttcccgaccgattaaaaggatggttccagtatccgcatccccacgcggaacgaaattaccttcaatttcatctgcttctgggtctggagcaccgtcctgagtcttgattgaaatacctggtaaggagaacatccccttggttaaaccaacccaacaatgcttcccgtttgaaagctttgtccggaacatagtagcaacataatttggtacaagattcttagtataaacttctgtaccgttctgaatatcaattccatacaagtctttcttcatgatggaatcaatatcataaaggttgatggtttccttagcttcggtaattccaccagaaagaaccaagtaagggccgtcatcggctgctaacgtctttaattcgttagtcagctccagcttaacttcacttaacccgctcatctttcgggtatctttaatcttttcgttctcgtctagcaccccatattcaaaattagaggccccaaacttagcaacttttgcatttggtgttcccattaaatatcattcctttcttcaaacccttcaaagttagctgtgaccattatgcaattatccaagtccggatccggataagaattcttgtagtaacgttcaaagccatgactgtggagggtttcatatattcgttcttgaatatccattagccggtcatcattctcttcacgaatccaaaaatcaacttgtacacgtgggtattcaaaaaagcgagcattgtcactgtaaattgcatcatccccaggtaggggggtgatccgaatccacggtgctgaactcgctttaataaatggatcatcaggcgtactagtaaaaattggaacatatgataatttatcttgtcgcaactcatccatcatcacgactaggcactcatcattcgttagataatcggctacttgcatctctggagttttcatactttcaagtcctcaataaatttagccaatattttcttcttagcagcatttcttgaatcttcaacaaagtgttgtggatcttgcttagcagttccagcatcggggaagtgagcaatccatcctttatctttgtcataaccaacatcgacagaataatctccaccgttagtcttgagattaccgtgtttagtatgatcttttaaaggagtcttgcctgaatgatcagagcctttagaagccacaggcgtccattttcttaattcttcttgaaagactttagcaccatcacgggttgcttttcgtgccttcttttcttccgtcttttcaagtttagttaagttagcaatcagctctgcttcaccggtcactgccattttggacaacctcctgggcggtaatttttgttagatctcgctttgcataatcaggatccattcccgtgatttcataccattttcctcgccagttaattaaccaattcgattgaatttccttacgagttttgaaagcaattaaaaacgtgggtgattcttttctgaaccccacgtttgaactgttttggacaaattcacggactgacagcttaggaacttctgcccacacggtaaattccttaactttctgatccttgatcggtcgatgagtttccggattgatccccatttggactgagtaaaatgttatccgttccgtcatgttccgtagtttcatcggtattcacctcactacttatttgattaataaggccatcaattcctgatgaaagaactggtcggtaactatctgcagtaattcctcgctcgtagaagtcttctttcacctgcttcataagtgcaattttgaatcgcggttcgtcagagtagtcagcaggcttactctcccatttaattgcccttgcaatcatcaatgcggcagcatcaacaattattttaagaatttcatcatcaaagtcctggtcaattttgcagtagttttttagattggcaaagaattgttcatcactcgagaaagtgtggtctgtttccatcctactcacctagctttgctaacagttgatccttagtatcggttgaagtataggcaattccatgatcatctaagtactttttgattgtgtctaccgtatcagcactagtcggtttaacgtccgccccgttgtcggacggcgttattttgacgctgctgatggaccagtaacaaagtaaccagcgttttcatcggccttcttcacatctaaacgaagaaccgcttggagatattgaccataaatgtcattatcaacccaccgtacctggagatcttttcgatttgctaaaataattgcacggtatggatcaccaacaaaggcatgagcttcaccctttgctccaaataagtcatcttcaattacagcaacgttgattccagagaccgctttaccagacggactagaaatactatcttgaagtaagtaacgtccattcttatctttcaatgtatcaagccagttgtagaagctttggctggcaataatcatcttattgtaagccacatctaaatcgacattccaaattttctttaggtcatcgattgcattagagccatcaacggtcttagctgaaaatcccttaaaaattgtagcaatagccgcattctttgtatttaaggattgttcttttgcgtttcgagcaactaatccagttaaatcaattgctgaatcatcaatcgattcttgtgaaataggaattgctccacgataggtctcaatttgccatgctaccttaagaaattcaggtttttgaagatcaggattctttgcaagttcttcaacagtatgcatttgagcagttgcctttttaagaattggataactaccagaagcagttgtggcgttaaatacttgaacaaattggctaagatcagttactgttttaatttcattttcaggattgtaaatgattgattcaggaatagtaacgcttgcgtctgaagaagtaattccagtagtaccatcacgatgttcttggtgaagatatgcgttgaaattacgtttttcttcattttcgtcctcgttattttgagaacgcttatgaggatctggagctggattacccttagctgctttacggtaaagcttaaggtcatcttcaatactccgaacttccttttcagcagcttcaatttcagaacgtaatgacttagctcgtgttaagtcttcatcagttgcgtcttcatttgagagcagttggcgcatttcattagttttttcgttaattaatgctcgcttaccttctttttgagcaagcaattctttaattttttcgcgaaacatttaatttcctccttcgagtgtcttcaataattcttgtcgttctaattcacgtaacatctttttacgtttctgatcagtagcatctctattttcttggctctgcatttgcttaaccatattgatcgaacgctgaccgacctgaacttctgtatccggataagcaggtgttgtaactactgatacatcgaacaaacgatcaatttgtcgaatggttcgttcataatcaactccatcctggtcagattcttcccaatcttgggcctcatctgtgttggccaccgtaaaagcaaagctgcattgattaataacgcctgccttgatattggcgatcaaatcacgcgcaaatgatgtatcagttggcttaacagtgaatttcaagccaattgcatcagaagataaagtcatgttcacccctgatcgtcccagtacctggttaggatcgtgattgatcgtcgctactacatttgacatatcagcgtcatcgaacgctcctggagcaatttgctcaataaagcgagtaaagccacccaaaacttcggatggcttattgtatttggctgcataaccttcaattactggttcatcatcttcatcagttgccgttctcatctgaattggcatcattaactgtcgagtttccaagtcgcttgtcatcgattccacctcccttcgctgttgattgtttctgatactcttcttttttatcaaggaagacagtattcaaggttgattggaaacggtctaagtctggattgtcagatttgactaaccccatccgaactcgtccttcattaggagtaatgacgttatttgtaactcccttttgtacatcgtccattgacatccctgtttctttgcgtgtatcaaattcgatgtggcagttatgacgttgccgatcagtcagcattgtcatttccaaattacttgcaatcggcttgaagtaataaggtaaatcagaagtaataaagtcttcatttaattgtttaatcgattggttaggactattaactgctaatttatatgctggaatatgcaacgctttggcaatttgagcagttgaatagttgttgctgttaattagttgcaaaacattggtatcaatctcaattggcgagtaatcgaatgtatcatcagtaacgattgggctaccggcattgctattagcttgtgcatattcaaacgcctttctagttttaagacgcgcttccggacttaacttacctttagcctttagtaatccacctttaagacctgacttaaagaaccgccgtaaagtcttaattccatcatcctgtaatccaatctcatcagccaaagacaacaacggcgaccggccatgaataccatcgtaggtaaagaacataaaatgaattacatcttcagccggcacaacgattgtttgaccaccgcctttttgattgataggtgtaaattcgtatttaatattcgttacatcagaatcatcaatataggtttgcgatggtggaaaatattgtatttctaacggtgcttttgtatgaggatcacgaattattcttgaaaaaccatccccagttaaaattgcgttaactgtcattaggaaacgccaatgataagcagataacatatcgtttgggtgcttattcagcaaataatcaacacttttgatattctttactgcatttttaccatcatccaaaatgacaatcggaaatcgagctacattactagcaacatgagagactgcagtcagcacatcagagtttctaagagcaccgattccactataagatggcatattgctaaaccccggaagaatcccctggtcaatataatcttgtgcccattcgcgtttctcggtatgaaataacactcagcttcaccccctttcataagagataaaagccattacgaataattcaattgaaataattagtaagccaatcttcgtggaaaataaaaagcctgtaactgctaaacagatacaagctaatatgaacagcaaaaccggttcgtttagtttccagaatttcatggcatcacccggagaagaaatttcaagtcttcatccgtaatctcaaatttctcaatatacggggcaagctttctcagtcgttccaatcgtcccttgatttcattaagtgcgggagttacatcaatcttcattccttcttcaccgtcgtatagatacttagccatgtctattcctcctcgattcctttgataaattcaattgcttccttagttaaggccaatggatggaaatattctccatctgaacagtcattgatgatcttcccttttaataggtgctccacatcatttttagtgataaaggtggtccagttgctatcgttgccatattcatctagttgcttaatatcatggctaaatttatctttttcagaaaccaaagtcatcattaaacacatcctcatctgttaaataatcatcaatattttcacggaaacaaattgcatatgcgtctagcaatgcatcggcagcatcaatcttatttgaataacggttcttatcaatccggacaccattgttatctgatttaaggatcgcgttagccattgcgccagttaaaatttcattgtcagaatgtcgaactcgcttatctaaaatatcatccctaaattgcttggttggcattgaaagagttagtgttccttgacgaacagatatctgttgccattccggatgacctttttcaatctgagttaacaaggttccatattgtgcggggtcataacaaattgcctgaacatcaagattgtgttctctgacaaagccatccagccattcatatacccgttcaacatcaataactccagattcaagcttcgtaatttcacactggcccatcccttgcaaccggacataatctaaccggtctgctttaatctttgcttccaaaccatatttagtaccgacaaacgcataagaatccgcataccaatacccctcttgaggaattaaccaactaattgcataaaggtcagatgatttaccaacgtcaatcccaaaccaaactcgttgaccatcaatgtcaattggatcaatttgagctgcattccaagtatcaatatccatataactatcctcttcggcttgtcgccacatattaaagttcttaactagaacagaattctttgtccctttctgtttagcttctttccaccgctttgccaaatatccatatacctggtcttgcaaagccgggacactcagaattggattggatttaatccaggtacttttatcatcaacttctgatacattatcttgttcagcaatgtaggcaaaataagtatcatcagtaatttcacctttcaaaaccttcgttgcatagggatattcaattgtatgcattggaacattcaaatcaaagccggctgttgaaataatcatgataagtgagttatgaagtaaggcctgaccggattctagtaattccatcatttcagtggtcttacttgcagcatactcgtctaggattccaacatgaggttcaaaaccatcaaccgttcccgtttccttggaaagagaccgaacataagaataatcatcaaggttactaattaaatcacgattaacttttgtcccacgttttgtatcaccatcactggaacgtagagcattgaggcgtttcttaatcatattaaaaacgatgttcgcttgctttttatcgttagcggtacaaaatatttgccgggagaattcaggtgagttacccatcaagaactcatacaatgcaattccggaaataaggatcgacttaccattttttcgtgccattgataacattccttttcggaagcgccgttcagatggcttgtcttttttccaccagccatacatattagcaataatgaaacgctgaaaatctgctaaaggatacgcccgcatcgtttttggatccggaagtatttccatgaattgaataaccttattagcacgttcattatcataaaaatattcaaagtcatcgttatccgcctttttaagatcatttaagtacctttttgcagctaaaatcacctttttaccagcaactattttgccggccacgaccttttcagcataatctttagcgtaattcatcatgaaatcctaaacttatcacgcaaggattgatgctcttccttgtcagtttgtggcatgttcatctgcagccgcgaattaacattaagcccaagatcagatgcaagaccctttattgccctggttgctttatcaattgtcttaattgcgttattgattttagcaatgttctttcttttcttggactgttccttatttaattgaacggaagcatctttataaatgctgtaccaggtacaatacaattccaattcgctccggtccaagttacgcaatggcagctttccgatagaaccaataattcgccgatattccgctttggccaccttatctaaatgtgccggcggagtcttttgcaactcaggtaaaccatcggcagccataaattctgccttatattttgcttcttgttcaaccactctaaggtggcctgttgactgcgataataatttttgctttcttgccaaaaagctcacctccgtgctatgataaaagcatcaagaaacgcatatcctcaagcttttaacagcttggggattttttagtatcgggcctaaaaatgaaaaattgttggaatttatcgtgcaaaaaagtcgatgtgcgttccagcgttttgaaaaatctaacccccgttcaaaatgaaggggggcttatccattcttgacgacccggtagccggtaaaatcagccgttttgaagccattcaaaatcttctgaaatgaaatttgttctttccgttcacataatcgttcctcacagacgtttggatcagtcatgataacaatatgattgattcgatgatagttactaagcaatgtatcaatccgcttatctggtaacgtcttaatgatccaaacattattgaatgtctgttctgcctttagctttcgtaacatctgatcaaagaatagtgtaatgtaatcgtggatgtcgtgattgctttgttgcattggtaaaccagataacgcatgcattagctcatcataatcataaataagatcatgctcagtcatgtgtcgatttacatatgttgtcttgccacttgcaggcaaaccacaaacaatattgatattcatataacgttccaatcctttatgatgtttcatccattcacgtttcgttttaatcttatgacatccccgacagagtgattgtagattgtcattattaagtcgatcactccaatcgtccttgctggggatgatatggtcaaccagttctgcatccattccacaacgctgacacaatccataatcacgttcaagtatctcttgtcgcttatgcttccattctgttgagtgatagaacttaacgtaatcattctcttcaacattacgatggaaattatatgctttgtcgttatccttgcgaactatcttgtcataggataccagtgttggcttcccattgataaaggttagcttggttggtttcaatatactcatcccctttctaatatgtatgagggcaaaataaaagacggtagccatttgctatcgccttaatcatttaatcttttatgtattagttcgtctaattctttcaagtcgtcatcagtagctaaatcacggataaacttacgagcatatgaacggtaacgatatatccgattcttatccttgttcttatcgtcccacttcttcttggctctttgttgtgcttcactaaccataacatcgaccttctaacattaatatggtatactatatatgcaaaaggacaagagctgctacctctcgtccctttgcgatccagaaaaacgagtttgctggctaaccgctatttgcgattagctttttttattatcgcatatgcaattgcaaagttgatacttgcaactgatattgctacgagagcattaacgataactgcatcctcaggtttccagataaactctttcatccattgaactcgcctccatccggatagaaaggctgtcgccggatcgctgtagaatattgataaggtcgcgactccttacctcatctacatctattattataccttattaacatataagaaacaatagcaaatcaaatctttttgagtataaatttagccgacaagcgttgacctgtcggctttttattttgtattttattcatgtgtcgttcggctctacacagcatttgatattcctgcctagatgctaccaagccaaaccgtttagtctgaaacattttaatcctccaaacaaaaaagccagcaaacattagcctgctagcttataaatcatttattaacaccattatctatgcgcaaaatttttttaattctattgataacttcctctgtcatctttttgtatccgttgtaattttcttcatagatgatcgtatattgcgttgaaatgtcaaatggtaaatgatttttgtaatcagtttctaaactcttcttactacataatgtaatcacgcttttaccgatagtgtcacatattccaagctcatagaaaacattaggatttcgattgctaatatcagcaataataaaacttgaagcgcaaatatcttgccaaatattttcgataatattattaccacgagttggatcaaatcgatcttcagactttatcaattcacattcaagcttgttgttactaatctcatctttaatcgcttgcattgcattttcaggcccgtcctcaaagggcaaaacataaaatccttgattaggttttacaacgatatctctagcctgaaatcttgggttaaaattcattattgatcttttcctttcaaattcatccctaatttgttgacgcgctctcataaaacaatgaagaaacgaaaagcttgatcctgatacattaatactttcattttttaaaatggcttgcattaaatcaaacaaaccactaaaagcttttagcttttcagttctgcttttatcaaaattttcttttacaaatgtaagactgttattaaattgactaatattcacatcaaagtagcagtcaaatttaaagcccagctgttgtattcctatattgttagcgtcctctaacgaaggcaattgtgtttgttcatgtatttggtatgcaatagtgttaagctcagctattgctttttcatcccctaagaacacccgaaaatcaactttactaaaggacacaagaacatttttaggagtcataagtgaataattaaactcccgtatatcaggatccaatgctaaaaacaagaaatctaagaactcataaagtcctttgctttcaatgtcaaagaatttttctgaatccttaggcttatgcaaagtattaaatgtacttgaataatatgtcaccttattttcacctcaacactataatacaaaaggccagccgtaaagactagcctgaggtaaaaataaaatgtagtagtttaacgtcgttgcggacaatcaaggctaatggaagaaaacatctagtaagtaggtgcttcctcctttcgttgattgttgttaaaagtagatgagccttgaatgctgatggacggaatcgaaccgccttctccacgttgaaacggaaacaactgtggtgctttaccattaagctacgtcagcataatacagaaatgcttgcatccactaatcgtttttgaattttgttactcattgcatctctgcattaaatcacggcttagacaaaaaagactatgcaattacgaaagaggagcgttcatctcctatcatagttaaatttgccgtgataaagccgagaggtggattcaaaccacacttttgccacacaagaccgattgtgtgcccatcttggatctcagcaagcagtgcgactcgtaaagcactgcaattgcgaatatcgggaactgccccacaaatattggaccactccaggatacttggcatctagtttgcatattcgcataatcaggaccacgcaatcaccgcacccggtcgtagttttccgcctactcctgtaacggtattgctgtccattcatacggtaatcctttagccgttgagttagattacgtactcttctgccgattacagcacggttgctacgagactatcagagtagtatgtaaatttaatgatctaaaggagatcttccaaaacgcacaaaccaaatttaatcgttaccgtaaatttattttgaagttagttaatgatagtctcaacgtggattatggggctcagacccatcagtcagtcaaacatctgatccacactcaagcttaacaagagatcccgtgtggtattaagcatagaaatctctttccttaaagccagaatcctaaatttgagtagttaaaggcttgctcaggcacaattgggggtcacaaggctacatcgctaaccttccgacaatatcattttcgcacttaaaaacgggcttgaagttcactaatagttcactgtttgttcactcgttgttcacttttttcgtccttatatgcatgaagatcttctagtaagtcagcatccccgagcaaactagtatatctttccagcgtatccgcaaactcactacaagcaatttttaagtaatgatagtagcgcgttttttcataaccaatttgattagctacttcccaatcttttttattctgaataaacttagcaattaatattcgcctacttctaagactacatgcgttgagtgcttgagcgattgtctcaaccaagagatggtaattagcaactttaaccatttgattttccattgaattactagcagcacttgctcttggcattccgtcaatttgtggggacgttagcttaattcctccacctgctaagcgacataagcgtgcatattcgtccttaaagaaatagcgaacattatcagtagttccgtcaacatctaattcttttaaaagccccacttttagcactctccccattttgatataatatttatgtttgataatttgaaggagcgtgccattactgtggtgcgcttttttatttagtatctagataatactagaacaataatcaatgacactaccgaaaagattaatgcaaaagattgaagattcattattgctcatccctcagataaataattcttgcatccaagctttctaaataagcttgcattgaccttagctgtgcatttagcattgttaattctaatggggatgaaagctttggtccctctttaacaataaattgagctagccgatctatcttacctaacagatcctttcgctcctttgataattgctgaagtacttttcgtttacttgtcattgtattttctcacctgattagttcgccgttcctcgaagtttgcttgttttatcgataggacagttcctaagacaaaaccaacagtaaaaatcaagacggcgccgataattaatagttccgtcatttatttcatcccctcttctgctttttcttcaatttttctcaattcccaataaagtgaagaattggctaaccagtgttttttgccacgatactttgttcctttatagaacggtagctcaaatcttcttgctaggtctttcatcattaagcgattaatctaatacacttttcttctctcatcgctcttcattaatttttgatactcaacaaggattttatgtaaatttcgtcggttaatcttcatggcttgcttcctcattaaccaatagcaacgagtttagccatatcatcgtaattaattctgaaacgctctaagtggccaagattaaaccgagtaacaataatctcgtcaccgtaaagtgattgattaatgatctccctggtagtttctcgtactgataatttaagaccgttatgaaaaattatttgtgtccgcattaagcaatcaccggatacttaatctcgccaaatgtttcttgctctagttgctgaatgtgcttcttaatattattctttgcttctacttgccactggttgttatcagccatgaataatgctgattgcatcccctcacgcattcggaagataaatttgcttgctggctgatcaacttcctggaatgtccggaaaggaattagctttactggattaggaaccttcacttcatcaacactagcaacaccagaattaatctgaacactttggcttacaccatcatcggtttgttggtgaatgctttcatcacgaagattgctaacaactttcagaatgatattccggtcgtcattctcctcaaaatgtgactgcagcataataatcatgctttcctgatctaagtaactttctaagttaagactatcaacgactgcccgaacctcagcaaaacaaggacgttgaccatgaccatttaactcgccgactacttctactttagtcggactaacaacatgaattttgatactgtcataaattgcttgagtctcactttccagccattcaatcaagctagttaactgattcaattggaggggatgggcaataatcggatcattaagcaatgctgcatccccatcgtgatcaagaagatattgccgtccatttaaggcagtaaaaagattgttgccattagcatcatttacgagttgttcaaattgggttaattcaccgttaatctttgtttccatgagttagttctcctcctcgtttcgttttatgatttgtttaattaattccatacagtcatccatgacggtctgctgactaaagggaggctgtccggcatgagcggtatcaaagccaatgaaacaaccgtttggcagattagctaatttaccatattcaggagtccatgttatgcctccatatacagataagcatgattctgtttctgataaatggttgtaatagtagtcacttggcaataattcaacgtacccacaatagtaatcttgaagtggtgagaatgaagtaggtattccagcaaattgacgcatttcacgtataattactcgtcgacctttgtattctccctcaaaaactgttttattaatatttggctcttgcatcagttagttctccttcttttgtaaatcaataaccttccgcttttcttctttttccacttcttctactggttcgccagtgtccatcttagccttaccatcatctggatcgatgtaagtttgacccttaatgcctgacttcaactcgttaacgtgaactttaccgttagtgtcacgacctagaagcatggtagttggtacaccaacctctggagcaagggtggtcttaacttcaaccgtgacatctgaggcatcccgtttttcattaggggctaacgtgatattaagttgtaccttccgctttttagttgggtccgtgtttggatcaaggatattatctgctacttgttgtaatgcacggttaagcttaacttgcacaccgccatctgcaatttccgataaatcaaaattaattgctttcttcttactcataactcttctcctccacttcaataaacatttgaccatcttcacagtaataattaagtttccagccattgcgtctcatcaaatgaattaacttctctgcaattttttgcccgtcaatgccaagattaaacaaatgataaagttcaggctccatcacgaagtcatcacagcccagagcttccatatcaatggggagataaagccgattgtaatgacccttatcgtgtagctgatgagctagattaacctgcatgatatcgaatagctgatcttctaacatcttttgatctccctgccgccgtttagcaacatattcgtgtcgtaagtagttctttaattccattactcctcgcctaccttttttctaaatttaagtatttcttgtagccgccaatcatcagccggcaaaagttcttctgctctcagccgactgtatttccaaaattttccgtcaaatgtgtggtaattttctagttcatcaagggcatcacttaatttgtctgttatgaaatcagtcaaacttatcaacccattcggaaatgttataaagctcttttagctccgtagtgtggggcattttggtaactccactaaacgctaaaaagtcacttgtatcattgcaaataaaataaacatcctttgctttcctgcttaacgaatcacattggattgctactccattcatccccctaattgccatattgaatagcaagaaggggattgctctatctgacatttcttctacctggtaccaataagctctagggtcataagtgaagattgacaagaattttaagttagggtcagcatgtaatgaattaccaactcgatcatttgtacagtcatcccaccagcgcttgattaaaattccaccagtccccgcagctatctcaaaatagtggccgttaaacttatcactatcaactaggctattaagcaaggtcgcaatgctatcaggggtaaaatcctgcttcttacttttccgttcagcctgttcgtcttcaaaatattcatggaaccagtcaaactttaggtccgttgaaacttctaggaacttcttaaagacttctggacgtttctgattatcaagcattagctgcagcattctttccggggccttatatgactcgtcaatttctaatagcttattaacggtttttgtatcaaactgcattattccacctcaaattcccgtcattacagacataatcttgttgttatcctcgtttgctagcttgtctagcaggtggatatatactcgttgggttgtttctgtattgccgtggcctaaccgtttagcaacactttgaattgaaacacggttagcaattagtagggatgcatgagtatgacgcaaaccatgaactgaaattggtggtattcctgcctggtcacacatttcctttaactctttattaaacactgaattataaatgtgattaccacctcgggtattagtacgagagtcactagcataccaatgagcccagattgactcatcttcttttactccatccaggtggcgttgtaggtcagttaatgccttaaaatcaattaggatttgcctaacagaatacttgttcttagtcggcataaagtccccaggtttaacttgagagtaatctattttcttgtagttcagtgtcttattgacgtaaatagacatgttattcatgtcaacatcagctggggtaagcccaaggacctcagcaaatcgcaagccagtacgtaacgtaaaatcaaagaagtcaccatatccgctttgatcagcattaaagacttgttcaagtttatgaacttcatcaatttctagccatttcttaagtttctttttcttcttaacttgagaggtaatacggatcttgtagcatgggtcacgagaaatccacccctcatagaccgcatctctgattggcgcttctagtaaacgatagaaattacgaacagttactttttcgtgcgtttgtccataagcattgatgagcttttgtatatcagctcgggttattttatctagcattaagtctggagcaagtttcttaatttgtttacctgtcaaaatatatctttggtaagtgacatcacggacatccccgtatttgtaagtctcataccattctttgtaatatttccagaacttaatagctctcttttttccaacttgtaccatcgatgcttattcccccagatgataaacaggaatcttaggcttagcaccagtaacaacaactgacttaccgttataaacatcattatcatgttgaacagccgcaagattagttaatccctgttgctgataacgatttaagatcgaacgtaagtatgcaaatgttggacgatcagcattctcaaacatggaagtgatggcaaatgctaccacgtcaccaccaagttcattcacgaacgcttttaattcgttttgtgattttggggattcgagctttttataatatgaattaagagtagtactagtagtagtatttaaattatctttactcttacttaacttaactctatccttacctaacctaacctgaggatccatttcggttccattctggttccaatttggttccatggagttgaagccttgtccctgttgaggttgagagttttcacttgaaatttgatttttatttttggaaccgctttggatacagtttggttccattttgtctccatcttggatacattctggagacatttcgtttccaacttggttccgttctggttccaaatcggatacaaattggtaccgcttattcttatcaagaccaattaatttcatatcatcggtatatatcgtcggagtgtatcggtcctttttgacgtagttggaaactaaccaatccttaataacgactacaccatcatcaaagacaattaaatagtccttctcaactaatgccttcaagtcatcttcactagcaccaatcatccgtttaattgacttaggattgccaacaaaaccatcatcgtcagcattcatccccaaatggaaataaagcgattgagcagtaagccccatatcaaggaacttatccgtctcagtaaccttctgactaaacattctgcgttgtgccattgtgtaaccccctagttataaatctgcttaactaattcatcaaagtcttgagattcgcttagccgcttaaggtggtaagcaatatcttctgctaacttcatatgatggctgtacgtttctgcatgcttaaattgatcgcataaattacaaataaaaatagcttgatcaatcacattgttagcaagtttttcaacttctgctgcagtatctttttctgacatatgttataatctccttgtagatttcttatccagttattggattttgccatcggtgttaccagcgccggtggctttttttgtgtgcaagtcccatagcattagtgaatagaagaacagcaagaatactgctccaccatagtcgccaacgcctacacaataagcaatccaagcacccatcagcattgctaagagcttcgaattaactatttttgttaacgtcatttgtttcacctctttttaatgtttcttctgatatttttctttcagcagcaatggtttgttccgctcatacagcaagctgtacaccagtgcatataacaaacacattgcaataattaatattggtaatccaattagaaatgccacttaatcacctcttattgcggtaatgatttattccagtcaactttatcttcatgttgtgctaaccagcgtgtagcctttcccacatcaattcgtactggatggccttttccagcgttcaatccatagacgcctggcatcttgggcaacaagtacaactttaaccaagctggcgacttatcatgaccatacttatgacgaaattctttaagactaattaacattggtttatattgtttaggcaccaaatcatactgttccttaatacgtttgagcacttcattagtaattgtttggtaatcttgttcatctaaggttgcttccatcagtaatcacctaccttatttataacgatgagacctgtaaatcttcttaattacggataaccacctgtgccagcaagtagttatctaaaaacgtctaaactaacattcaacgcatcagcaatcttacacatcagttcaaaacttggcttcttaatatgaccgtacttaaactcatacatagtcctattagaacgtggtaaccctgctttaatagttaactggtaaatactcatattttgctttttaagttctttttcgacttcatcccacaacatcttgtgatacatctctctgattaatacaatatattgacaccgaaacatattttcgatatacttggcctcgtacacttagcactctattcaaacgactgctaaatcattaagaaaggtggtatttataatgacattaactaactggatctctgtagttggtattctagtttctttaggaatagcctgttggtcagcctatcaaacaaaggtagctgctcaacttgccagtcgtccgtatatttctatttatcttgaagcaattgatactgtctacttcagtaaatatcttgtaattaagaactttggaaatagcagtgcaattattaaaacaattaactttattgaattggataaaagtaataagtactcccaagatatccaagaaggattaaacggactaattaatggaagcatcggtccaaagcaaaaattaacaatgtcgctaaaagataattacaaggttccaatcaaattaagtgtcacttatgctgattccaacggtaaagaatatagagatacgttccatatcaaaactgatatgatgtcaaaaatgttgtggagttctgttactacaggttccgactctaaagaagcaagtgctataaaaaatgcagccgctggaatcataaaaaccattaaataatcataattttgtaatggtaataacataagcgattgcccaaactatcgaagaaacaattaatccatcagcaaaactttgccaatccatattagtcatctcctttcgaggtggctttttctattcttcattactgccatcaaagtgaatttgaaagatcggatagatcaactggctgataaacttcatctaaaatgaaatcgattagttttgatagtcccactgctaacaccaatagcagcagggcttttttctttttcttcttcatccatcattgccctcctccttctagaagttttatgcttcaactgtcaaaagctactctctttcttctattttgctatacttaattcatctccctatgaaaggaggtgattacatcaaggcactcaaacgaatactattacgttttcttgtcagaattggtgcattgttttgctgcttagttttgctactaactggctcttattccgtagcccaagtgtattcaactgctagcaaaggttctgcactttatgaaattgaacactcaaatttgcttataacgataattgcgatgctcccaatctacctagtttggaatttatttgtcatattgattgaagttatatcaatttccatcagcaactataaactttcagaaaagttaacaaatagattgtatagattaggaattcttatctccttggtagtatccatgctctatacagaaacagctgaccagtttcagttacttgcgacacttatctcgttttgcttgatattccaatttcttatcccaaacgactttcaaaatcttcttgttgacataaagagaaacgctcatcaaaagcgggcaaaacacaaaaataagaaagaaaatcaatagcaaattaagcacttagtcacctcccttgggtggcttttttattttgctcgctcaccattgctaccctcctagtacagttttctgtacatattctttaaaaaaataagtgctaattttagcatcaggaattgatagaaccgcactaattgccttaatttccttttgggtaaacgaactatgattgttaagcttaatattcaaagcagttcgactcatactaatagcttctgcaagagccgcttgtgacatattcttttcccgcatacgcttttctaataatgaatagtcatatttgctcatggacacactcccttctgttttttgttcatttttctgaacaactatattatatctcaatctgtcacggagtcaagataagttgtacatttttttgaacattagataatgcgcgtccataaatctgtgctaaaatacaataaaggggtgttaaaaaatatgaacacttttcaaaatagattaaaagaagcattagatagctcaggactatctcaagccgaattagcgagacgagctaatattggccgaaattcaatcagtgactatctaaaaggaaaatatgaagctaaacaagataaacttcatgccctagcacaagtcttaaacgttgatgaaggctggctaatgggctatgacgttaaacaggaaagaaaagttacttctgaaactaacttgccaactaacatcgtttacccgctgggagataattttgagcgcatcagcatccccctcattggtgaaattgcctgtggtgatccgatcacagccgaggaaaatattgagggctacgttgaagagatttttgaaaagcctgttccaaaaggcaacctctttgctctacgttgcaaaggtaaaagcatggaaccaaccattcacgacggatcaattgtaaccattagagaacaacccacagtggaagacggtgaaatcgccgctgtccttgttgatggtgataatgaagcaactctgaaacgtgttaagcaccaaggaaatctaattatgctaatgccagataataaagaattcgacccaattatcttagataaagataatccaggccgaattgttggtaaggctgttcacgtttcatggagtattaaataataatttacgtccaaatactgattgacgttaaaagctgcgataatgttgggggatatgtatgtatactgtcgatactacaggtcatgataaccagattaagaagtttatatctgagttacgagaatggttcgataaagatgaattatatgatggtctttctaatcaagacattcttgaatatcattacgatgaaaaagtttatcaatttggaacacatcctttagactcatatgatataaaaacttcaattagtaatactgacggccactatagggtttatcttagctttcgaaacggtaagggatttaatatcgggaccatcaaggacgatggcaaacttattaatcgccttaatgatgataactacgaaccccgaatctatgttttaggtgggcgttataagaaagtaataattgataaagatggtgccgatcacattaaaagttttcgagaaccatatacttttcaaattgattttctgaaaaatgaaaagccaaaagatgttacatatattaatgacacaacagctcagcaaatgttagaacaaaacaaatggtatcaagccagtcaaaaagcagaaaaaataggtaatacaatgcaatctgctggagatagtatggctggttgcgggtgtcttattactctactagttacaataccagtgattataattataattctatttctaattctttaggactttgggggataaataattgaaaaagaataatcaaaatagtgaattgaagtttaatagaatcatttatgcaattttagctgttttactacttataggaggaactgcaatatttatataccatgctcagcaaaatgaccctgactcatctgagtatgctgatcctagcagtgacgatagttcaacagatagtacagaagacgatgatgttgacgattcttctgatgacgagtctgaaagtagtacagaaacaagttcagctagtgactcgaacgttgatcaagtagtttcaatgatccaaagtcaatttaaggataaagctatagtttcatatgataaagacagcaaagcaattttaatcatcccttctgacagtgaattcactgacgaggttgttgacgttgcaaacggggacggggatgaagaaacttggaataagctaaccgattcaatcaacgatgtttcatctcaaatggttagcaagtatggcgcaaaggtcgcattagccatcgttaatccgcaaaatcatgacaaggttttatacgaagctttagatggtaacactgtttatgatgttgtgactgatgggagtgacgaataagcatgaaacggctgtttcttttaattattgtgctttttagtttttcgattgttgatggtaactgtaattctccgtgtgtatctgcaaattcaattattaatcaaaataaaacagtaactacaacaaaagctaatcatcaagctaagagaacaaataaaaatacttcaatcaatataacgtctataatagcagttggctcgataatcatatcactactatattatggctatattattatgaatttaaattatttagaaaaaagattattgagtataaaaaatcaattctatattatagtttcaattatagcaattacaattttagcctatattcttactattttttcaattgtagttgatgcggaaatacgacgaccaataattatcttactttctgtatattcaattgcattaataataattactattatcgcgcataaacaagccaaaagtgtaattgtaaagttcaaatataatgataaagagtttcaattcctacatagaatagatgatacaacaatcagtgctaaattattagattcgtcatcagataatacaaacgatgatatctatactttttctatgagtgatttaagtaaccaccgtatatatacaaaaaatacgaaaaatttgaaggaagtgtccccgttgaatttaaaaccggatgaatatataaaaaatagattggatgatcaaataaattggtacgataaaaaaagtgctactcaaaagaaatgctattactggtcaaaagtagttactctaatttgtacagcctccatccctgttatatcagtagcatttaggcaccaatcattcactgttatagttactgctttaatagctgcaattgctactgttacagaaggtattctgacattaactaaatggcatgaaaaatggattgcatatcgttcaaatgcagaagccttaaaacgtgaagaatattcttatctaacatcttcaggtgcttattctgaactaaacgatgatgaaaaatttcatactttagtggatcgaacagaatatattatctctaatgaaaacaccaattgggcctccttaggaaagaagaaaggaaaatctatttaatgaaacataaatgctttatctcatttaaaccagaagatattttgtataaagaaaccattcaaaatgacttagatgtcgatatgattgataaatctcttaatgaaccaattaattctgaaaatgaagaatacataatgcggaagatacgagaagattatttaaaagattcaacagtcactatatgtttaattggaaaacatagtgcggaaaataatctatacgaaaatcaacattatattaaacgagaaatacaggcaagcttatataatgatcccaatggtattctcggaatagttcttccagaaatgaccgataaaatttacaaaggcacttatacttgcgagacatgtggacaagaacataattatgttgctatcgatgataatacagttattaaagaatttagtacaaattactatattcctgatcatgaaggttgcgcttggggaattgatgacagatattgtattttagttaagtgggaagactttattaattcaccaaacttatatattgatgcagcctttgataaaagatcagctcctgtaagaaaaaagattactgtttttccgaaataatacgatatgttttttcaaatatttctttttttactggccactgctctccttcaacacccgtaacaatccaatctcctgcattagcatgcattactccttcaagcgttcgaatatctattggcttctttgtttgataggcttcaactggtatgttttttttaactactttatataatttcatattatatacttcctttgattcagcgaatttataattattatatcattaaattaatacttgatttctaagaatcgtccaaagcctgatgacgtaaaaagctgacaaatgaaaaaagcccatcccctactggcataggagatggaccagggttgaataagatttacaggtctcaattcaaccctttcattatacacaatttaataatggagggacaagtatggcttcaataataaaacgttatggaaaatggcaagctcgaatttcatggtatgacagtgaaggaaaacgacaaactaaaagtcaaggcggttttcctactaaagtattagctaaaaattgggcagttgaacaaaaagccaaactaaacaaaggaatcaacattaagaaaactatcaaatttattgattattacgatcaatggattgagacgtataagaaacctaaagtagctgaaattacttataagcgttatgaatttactcgaaaggcattaaatagcttctttgctgatactgaattcaaacatatcgatcgcaaaatgtatcaaagatttattaatgagtatggagctactcacgccccacatactgtcaaagaagtaaataacattgttcgcgcttgtgtccggtcagcgatgttagatgattatctgattaaggactttactcaaaacgttacactggtagctaatgaggataaagaagtaaaagttgattatttaaatgtagaagaaattaaaaaactgctagaaaaagctgaagctgagatcagtcagcaagatatttataccagtcgttatatgattatcacagccatttatactggaatgcgactatctgagattcaagcattaacatggaatgatattaattggctacaccaaaccattactgttagcaagtcctggaatatgtacactcattctttcaagccaactaaaaataaatcgtctaatcggactatcaaagtaaatcaaactcttctacaattgctttctcaattgaaggaaaagcatattagtaatatggtatttatgactcagtttggtactattcctactagcaacgcagtcaataaaatgcttcgacaattgttagatgaattaggtattcaacgcaaaaattttcacttccacagtttgcggcacagccacgttgccctacttcttgctaaaggtgtggatatatatccaatcagcaaacgtcttggtcatagtgacatccgtacaacaatgaatacttacgcttatttaatagatgaatacaaaggaaaaactgatgacaagattgtcaatgctttgaaccaactttagtttggtacactagtgtaccaaaggtgtaccgactttgtactttttaatatttttccatacttttctaaaatactaaaaaatcctacaatcattgatataacaacgattgtaggatttttatacttcatcatattttctcaaaaatgcgtcccccgagagtcgaactcggatcatgaggaccgaaatctcatgtgctatccattacactaaggacgccttatattcctattttagcgcatttattaaaaaaataaagagaatttgtcaattttatttaaaaatacaaatacatatgacgcttatttattcccccttctcctttaccagcatttcttaagttaatataatagatatgttacataaaacatgagggggaattttccatgaaaaagcaatctacaaccattgcttcaatcgttattctgatcataatcgctatctttgcactattaaatacggcaactgtagtagtcaatctttttggagcacaagtaaaaatgccactagtgctgctaatctttatctgtttacttattggggctattattatttacttgctatcattttctaatcacctcaaaactaataagcaattaaaagaattacaatcatcgcgtgttagtaaggacgaattaaaaaagtatcaaaaaaagattgaccaactgcaaaaagaaaatacacagttaaggcaacaacttaaaagtaaaactactgtagaaaagccacaagattcttctacaaattaatatttcagagaggaaatcaaatgggaaaataccgttttattgcgatcgatgttgatggcaccttactagatgataatgataaattcgacgttaaccgtttaaataaagatattgaactattacaacgacaaaactatcactttattattgcaagtgggaatagttacgatgcattgtcaacgatctttcaaccgtgcccacttgtaacagaatttgtagcagaaaatggcggacgactgataataaacggcaaatctgtatacggcaagactcattcaattgcgacgttgcaacaactttatgcttttattaagcatacgttccctagccctgacatcctatctttatctggcgaaacacaaacaatccttgccgagcagtatcgcgatgttccagtccctttttatccccaccacacatatttttctgaccttcaaaaaatcattgagccaatttataacttaaacattggttgggccaaacgcaaattatcccaaactattatccaaggatatgtaaatcaattaaatgagcagtttccaaacttaattcaagcgacttatagtggagcttatggcattgatatcctgccggcaggcgtaaataaagccttgggattaaaaagactagttgaaaattacttgaacggaactctagatcaagtagttgcttttggagatacttcaaacgatattgagatgttatcagaagttggttatggatatgcaatgaaaaatgctactgatgacctactaaaagttgctgataaagttacaagatacgataataatcatactggtctattatcagagattgaatatcaatttattaaccgttaaagatattatgtaaactagtattcaaaaaaagatgtgcgagttgaaatcgcacatctttttttcttaatatactccaccatcgtagaaattgtaagatggtttattaaaatcgtaattaggaagttccgacattttaatgaaattatctgcaattccccaactcattaaattaattggtttaccaaagtcttcatcaggaatcactaccataatatatttacctagtgcgcgtgccattcctaattcaacacccattcctacatcttcttcttcaggaatgtagactgctaaaagcatatcagaagttgaaacacctactcgatcaccattgtaagttgctgtactccattcgcgatcttgcaaaagctctggatgttcatcaacacgtaatcctttatattggtgttgtaatggcacataagaattctctacatctactgtagggttatccttaattgcattcattgcatcctcataagctttattttgcttgtcagtaaaccacccggcacagaaatatactgtcttacttttttgatttgtcattaagtgaactcccctttaatttttgtacatttaagattctatcatggaataataaacttaaccaattaggattttttaatcttttctgagagctgtgttaattaattgcttggctgcctttgaaactgaaataccttttttatctgcatactcttttaattgttggtatatagctaagtcatccggcccacgccatataattcctgttacttgaccatgttctttattcattttaattccttccccataaaatgttagcgatattgtttaaaatttttgtgcggcgatgtaattgaaaatgagtagtttttggatatactttttgatgatacctaatcgatggatgaactttaattaatgattttaacatttccgattggatatgaggaacagctccatcagttgttttactgccttcttcactacccattaaattataaatttcaactggataatttaattgccaatttttcatctctaaaaataattggtgaaaattcttgtctgtcgatttattaactaaatgatagcgatattttaactgatcgctaagactttcttcaactggtacccctaaaaagactactttatttaaccgcatatgatcttgaagatattttgaacccatataagcatgaatgaattctgtgcctccatatgagtgggcaacaacattaattttctgcatatggtagtgtttctgcaaatagttcaaaacagtcgtcagttgcttgatttgtggatggtaagtaccattatagttccaagcaaataaaacttgaattaaggcattcttttgcccatgaaagtctccttcagtccagatacgtctgttaggggcaacccagatcattaaaactttttgtgcaatgtttttctgctgatagtacttaatcatcttattataagtaaccgtacttccgccccaaccaggaataagtaacgtaggaacagaagaatactctattttatcttggtaattttgtggtgataagggttgtccaggtgttcctcgtagtaagaaaccctgaataccaaaagcaagaagaattaggctaccaatactaattccggcaatttttaaagattttttcatcaaatcatcttcttatcatttcattttgtattttactcttattatacgcttgaaaattataaagaggatggtcttttaagcttttggatatggtattaaagttaatttgccattaatatattcgccaagatagatatcatcaacactgccatatcctgctttatggatttgttcaaatacccactgttcatcatgatggatcaattccattacgtcaatattgatctgtccatcattaattagtgggaagcgaacatttgcttcatcattttcgatgattacaagttgaccattttgttctaaaattccactcttgaccttagcaacttcataaattccgtgaccacgaagacggaacataaggtcattagcactgattcctgcacgcatacaattctctactaataattttccgttctgaattaatatttgcgggcgcccatcgataattcttcttacccaaatattatgatctttagcaaatttcacaataaatacaattaatgtccaaatcaaaaggaccattataaactcaagaacagaaatatcactattgtagataattccgccaataataccacctaaaacataattttgaacttgatcaatggcggatgttggcgcaagattccctttccccaataaattaatctgcagaatcaaacatagcataccaaggacaaactttataatgattaacgaataagtatccattcttctctcctacttcattaaattaacctgatgattaacaacatgtgctcgtgtaagggtataattatctctcgtttgacttaaattgacacggtaatcccgatcctcaattcgaacaagaattccatccgttaaagttgtggaattaacaactactttttgtggagaaacattatgatcccgagcaactgccttaataaagggaatcatctgagttgtttgggattgctgtgtggtacttttttccatatcggtaacttgaaaaccaataaaaagtaacaatagcaaaaagaaaattattcctaaatcacgataacgggtaataaggcgatgccgtaaatataaaaatgccattactgcaatcagaaggataaagatgataatagcaatataattgaatagttgattcatatgttggtggtttgataaatagctaattgtataaaatgtcaatttatttctctccttaacttaaatgtaataaaaacttaagcagctccccacccttttttcatacgctcatgatagaataataataacgatagtatgaaagaaaggaggaacttttaatgatcttaaaattagtattaaaacttggatggatcttgttagggagcatttcattcgttggtgggataattgggatgctcctccctgtaattccgcaggttccattcttcctcctcacaatatggtgtatcactaaaatttcaccacgttttcataactggctccttcgtaatccactctacataaaatatgcaaaacccttggtaaatcggcttgaaaatctgaaacattatccgaaacaaaaggcacaaaaaattaatagtaaataaaaaggtcttgaatgctatttgcgtcccagacctttttatattagccaaataatcgtgcccagaatcccttcttttgttctttaacaggcgattccgtaactttttcagctgtattcgtagttaacgtttcttcattatttgcttcgttttccgcagtatcttcagcatatgggttgcgttcaccaatccatttaaagaattcatcagctttaatttccacaaatttgccacgcttgccattgataccatccacacagagttcaattggcagtgcattccggtacttttcaatactatcggcagtaaaaccattgaaagtattaagcttcgagatatcaaataacaagctatgatcttgttgccggtatttaaagtcttcttcctgtgttaggtaaagtttagcccaccggttacgcgaactttccttaaagtcatcacagatttcatccgcaaagtaaggaggtacttccatatccgccatttgatagtaatcgcggaaaatcttacgggtatttgctaagaagtcaagcttaccagtcttttcatcgaatgcgcgccatggcgtttcatcgtcctctagtaagcttgccatccgcattacaaagtccttaaacagcgtattatttaaggtttgtcgtacattatagatatatttattggcttcacctttttgctggtcatcgataaccttatcaatttggagataataagttcgccgtgcagtttcacgtagcatagtaaaaccagaatcatagttagttgttccgattaatggcgcaattgcatgtggattgttgaccaattcattcatcgtatcaacaactaagtgccgactatattgatcttgttggaaaaagtatggttcaatctcatccattaaaacggggtatgaacttccaagcttcatgtagtgctcaattgcatcaacagtttttgcttttttctgcggtgtatctgtaggatagatagtcccaaaatcaattaatgaccgatcagtgttccatgtcaattgattaataatccgtaatagggttgactttccagaaccagcagttgctcctagaatcaagaagttaggaatatcattcccatcttcaggattcaaactagctttcgcacgaatttcccataaaaatggtgccgtaaaactatataaaatagcttcatagaatcgcttaccataatcatcattgtagtcaacaacgtattgctgatacccttttaatactgcatcaatactctttaagccatcacgaatttgactaatagtcgcaatctttccaaattgaattgggtgcgtgcctgtatcattcggtacgtacaggccactattattgttaaccagatttctttccatcggacgatcatataagaacgttgtatacttcttctctgctgaccgttgttgtggtgtcataccgctaatcaatgcatcctgaacttgtttaaaaatcttttcgcgcgatttcaattttggcttagctgctcgtggcgatacagctgttttttgcaaagtgtaaattgtatcgtgttgttgaatttgtcgttctgcttcttctttatcttgagagcggttagtcgtaatatctcgcatcgacttagtaatcattgcgggaattttattttcatcaatttgtttttgaacgtcatgactaatcaagtcggtcatatctgccgctgcgatttgatcggtaacttcattatcaagaattacaaccgcattcttagttcctttagtatctttcaagctctcatcaatttgattttgtgctgcatttaaaagattttcagtaaaaaatggtcgtaatactggcttgatgtcattcttatagtggttatcaagattttgaaatagccgaatgtcatcatcaaagactaatatttcttcatattggttacgctctttatcaaatgaagcactgtccaagttaagacttcccaaaatcacacgagtatcatgagtctcggaattacttaggaggtaaaaacgtgaatggatagcctgagttggtgcaattgcaacttgaaaaagattgttcaacacatttgcttgattgtcactagttaatgcttcaaagactttagcaggctttttattagcagcagatagcaatgcattggttaaagctaccttagtgatcacttcatcaccagttttagcttcataattttcagggctgctcagtgcaacttcgactttaatgaatcgacttagatactgattaataaagtcggcagtcacgttaccagtaactgctgttaaacgattgaacttattagcatcaaaaagctggctaatctttaatggtggagtatcctgaccattaaaaacaatatgaatcttttttagatctaaatctgtcattggcgtagtccttttctaaacaatattaactctttttattttcgtttatttaaaccaattttgcaagtgaccatcgaaatattttgtttctacgctagttttatatgcagatgataaagaacccccaatactttaatcaaatgaagtattgagggattattctaattacatagttttttaattcgtgttcacttgcgttactgcccctgttgcataatttatactaatattgttttgcacattgggcacgaatacattgtattgcaaactgccatcctttgacttggcctcaatatgggcacccgaaggcactaaattattaccatcatatacgtcagttacccgataacgaacttgtttattttgatccagagcttttcgcactaagccttcatagtagttctgcccggttgatgtactgcttcgagcttcgttggcccaagcagtttgagttgcaatattagcgggatttgactctgaagcatcaaaaccacggataccacctactaatgcatatcctagtaagtgtccgcgatcataagcatgtgagataccaccttttaagttatgggcttgtaaaaatccagctggcttccaattagtggctccattcccagtttcattccgattacggtattggcgtgttgtacgattgagccaggcgtctccctgccatgctcgtccacgcgaatcacgtcgattaacagcgtatggcgcattattaatatttgcgtttagtgccgtctgattgttatttaaaataaacgctccgtaaccattccattttatgtcagatgttcctaactgctgacggacaccattagaaagaacacccgtagcctgctcttgggttggcggcgtaaaagaagatgatcgattattattgctggaatggcgccaagatgctacccgttggattccctgtggtaaggtacttcccttgtcagatggctgggaaaaactaccaatgccgagaactgctactaaagctaaaagtaaatactgagtctttttattgaatcgaaatcgcatgtttctaaaatacctttcctcttaaacgtatgttcgtaaaagtattttatcattttaattgataaaagaaaatactcccaaaacaatctgtttcgagagtacttattctttatgctaatttatcttggcgctgagttcttaacttgtagataatgctcataataactaagaagactgccccaacactgactgaaatccgtgtatctgggttaaagaacataaatagtaagataacacttagcgcaatcaagctaaagtagttatatgctggataaaatggcatcttgaatgggtgatcctttaattcagccggattattacgccggaagtttaattctgaaatcaaaataataaaccatggtaccattccgggaaggacacttgaactatatacaatcacgaagatattagcagaggctgcattaaacattgatagaagcatgttaacaataaagccaaggaaaatccagaatgaaattgttaagatcgcaacatttggtacaacccgctttgacaatttactaaagaccttaggaacctcaccaccaactgaaagcttgaaaagcatccgactagcactatagattcctgagttggcaccggacaatgcagcagtcaaaacaacaaagttaatgattccagctgctccagtaataccaactttagtaaatgtctcaacgaatggtgatccaactgcttttaattcgtcccatggataaatggaaacgataacgaaaattgccccaatatagaaaattaaaatccgccaaataacagatttaactgacttaacaattgcatggcgtggtgaggccgcttcaccagcagtaataccaagtaattcaattccttgataggatccagcaatcacagatagtgagaacatgaatcccatgaatccaccagtaaagaatccaccatgtgaccataaattggaaattccaaccggatgccaattgttacccaacccaaggacaattactaacaatccaagaatgatcataacaataattgtaacaactttaatcatcgcaaaccagaattccaaccggccatatgccttagcagatgcaaggttcgcaagagttaagataatgatcattactaacccagaaatccagtctggcaagttaggccaccaataattaaggtattgactcatggcgataatatccgagataccaacaatgataaactgaaagacattactccactttgtcaggtatccagctaagggatgaatatatttagacccatagtccgcaaaggaaccagttcctggactgatatagatcatttcccctaacgcacgcataacaccatacaggactaaacctacaaaggcatatgctaataggacagaaggaccagtccatttaatagttgatgtggctcccatgaaaagaccactaccaattgtcccaccaattgcaatcatttccatttgtccgggagtcattgtccgatttaatttaacttcatttttctgattatccatcattctaacctcactttaaataaaaaagctacccaaaatgtccctagccaacccttgtcaatttttgataagtggttgagacatcttgaatagctattgctaacagatttaagagatattaaaactactcaaccacggtaattgttgttgtggttgaggtggaggttaggtgatgaataatcgatttattgtaaatttgcattttagtttcctccatttcgtttttcaataacattagaatactattagaaaattaaaaatgcaagtccttttatcaagtttttttgttttatttctttttgtgcgctctatttagcgaaaaaagactcatccccgcgaccgttaccgttattcccaagccaagaaaagtcgttaaattatcagtctcatttcctgtctgtggaagtatttgctggtcagaattatcgtttttacgtgaatcccgatgtgaacgatttagtcgattattaatacctgctatccgttggtgcacattttgctgctttcttgtattatttacctcctcataattttccgtgacctgattatcatcccccagaccttctttcatggggtaattgtcctgtgaatcttgcttttcctcttttttattctcctttgcttgcccctccttttgcttttctgctaacgtattctctttgctgtctttttttggcccttcatctttattgaggggctgataataaacatttactgcgctttttaattgtgataaatcctctatttctgtaacagttggaatcttatccattgatggtctaaaaccggcttggtcagggacattaacttcttcaaaaggttcaataatccaaattgcctttttggttggatcattcggtacttcacggtgagcataagacacttgttccacttttttaacttcatttaagagatgaaaataaattacacgtttgatttggacacattccttctggttatttgcgttagatacgggctgcgtaattagctcttgagttgtagctaaaactggtggagtatttaacgacagcgaaaggatcgttgacgctgtcgttaagcctactaagcaagtgtttcgcaatacacgaaggtggtttaaatggttcatattatctcgctcctcttttatatactctttaatatatatacgtaaagagaagcaattcgcattttttaaatcgaaaaaagctatcacctacaagtaatccttacctgcgatgacagctctgttaacttatagtgaatggataacctgctcaatatcatccacaatttgtttaggggttaagtggtaccattcatatagtacttcggtaggaacattatccgcaaattcccgtggtgctccaaagttcaaaactttcattccctttggtccatagtaacgagcaattgtttccccgaagcccccactaaggaccccatcctctagcgtaacaactacatcatgattttctgctaggtggtgaaggacatctgaatcgattccagttacagactttggattgatcaatgtagcatcaatgttaagcttgtcttgaagttccttccttaccctttcaccaagttcccagaagtcaccaacagccataattgcaacctcacttccgcgatgagcaatatcgtacttaatcgtactgtagtcatcttgtgttggcgtcccgtgaagaagaggcttttctggttgacgaattactactggttcatcagtttgattgattgcccaccgtaacatcgaaatcatttcttcgacgtttgttggtgctaaatattcaatgtttggcaaatcactaatcattgaaatatcaaatgttccttgatgagtagcagagctttctgaaattgacccgcctcgcacaatcattacaaccggagcatcatttaatgccatatcatgaattaattgatcatatgctcgttgcaggaaagtactattttgaaatacgacagggcgtgcacctgcttgcgccattgcaacagcagtcgtaattgaatcctgttcagcaatcccaacatcataataacggtccgggtgcttagccttaaacttgccaagatcaaacgcaccaggaattccagcattaatagcaacaactggcttatccgctgcaatttgcttatccaattcagcaaggacagcatcgctatatgattctccacttactttaaccttatcttcaccagtctttaagtcaaatggagtgcgccaatgatacttcatcttttcttcaacagcaggctcataccccttcccttttaaggtgttaacatgaaggacgattggatgatcaatatccttgatttccttaaaggtgtcgatcatcgtctgcaaatcattgccatctgcaacgtacttgtaatcgagccccataaacttaaaaatattattgggagattcaccattggtatcccgtagttcttttagtcccttgtatagaccaccttgattttcgtcaattgacatttgattatcattaacgagaataatcaagttagaattaagcttagcagcattgtttaatccttcaaaagctaatccgccacttaaggatccatccccaattactgccataacgttattatgtgattgcggcttcattaaatcacgcgcttgagccatccccactgcaagtgagattgatgttgaagtatggccgatttcaaaaaagtcatgagcgctttcttctggtgacgtaaatccggtaatatcttcataatgatccggatcaagaaaacctaactttcgacctgtcagcattttatgagcatagctctggtgtgaaacatcccaaataactttatcatggggcgaatcaaagacatagtgaaaagcaattgttagctccattacgccaagattagggcccacgtgtccaccaatttttgcgtcacgttcaagaacaagttgacgcatttctgttgctaattgttttaattcgtcaagtgacatgtccttaatatcgcttggttcattaacttcatttaagaggtaatcaggatgcagattcatctattccactccttcttgattttacatttaataattagtaatacttaatgctcttattattctaacactttctaaagcattgagtaaattactctcaagttcaaattgacgaaattcatgcatttcgataccattaaatagagtaattcgttaaaagggaaataattatgaaaaatatagacaacgctgcaactaacaaaatttcaccatttaaaaaattaacgacagagcaagaacaactcgtcaatgatattatttcatttactaaacaccatctaacacaaaatcatcctgcaatatatacagtctacggagatgctgggactggaaaaagcgtaatcttatcacaattattcgttcacattcaaaaagaagcgcggacacaacaaaattccgttctttatcatactaataattattttcttgttaaccatccagaaattctgaaagtctataaagagattgctgggccgataaaagagttatataaaaaggacttcgctcggccaacttcattaattaatcaattggataagcaaaaccaaaccattgatgttgctgttattgatgaagctcatcttttattatccaaacccgatcattataataatttttaccatgataatcagcttgtcgagattattaaacgtgctaaagttgttataattgtctttgatcaataccaagtcttacggatgaaaagtctctggacccctgaacgacttcaggcaattacaaaccaatatccccataaagattaccatttgacccacatgtttcgcatgaatgcgagcgatgaattagttaagtggtttaatgaatttactaactataaattaaccgctttaccagcatccgcccgtgatcattatgattttcgcatttacagtgatgctgaggaaatgaggaaagcaattgttcaacgtaataaagaagtaggactttcccgcattctttcaacatctggatatccatcaacactcgatggtggtaaacattacattgaggaaggcagatttaaaatgccctgggatcaatataactatacagtcaccccctgggcagaattgcctcaaaccattggtgaagttggctcaatctacacctgccaagggtttgacttaaattacaccggcattattatcggtccgccaattagccaaacacctcaaacaaaccaacttcaagtaaatttagatcgttatacagatgttgaagcattcaaaaaacgtgacgacctaactgatccagctgaaattaagagtttagaaaaaagaatgattatgaattctttgaacgttttatttaaacgtggtgtatatggaacttatctttacgctcatgatccgcttttacgacattctcttacctccctttttgagaaggctgggtttacgctaccaaaggaggaacaataatcatgaaagagcgtaaattaagtaaaacatggctgatcgttggcgcaattatcctcgccgtcatcgttctctacttcatttatcgaacatataagccagaaattgacctactactagactttaatgcccataataaggctaagcttctccatatgattagaagtcatggttttacagatatctttcttcttgtagctttaatcggtatcctaaatgcgattccgggaatgtcgaattccgttgtttgtatctttgctgggttatgttatggaccaattgttggttttctgattaattgggttggaaacattttaggaaactctactgtaatgagtataattcgtaaaattaacctctccaaacgggtaaagaaaagtaagatccttcattacctcttgcagcaaaagcatccgttaattgcacttacaatcggctttatgattccggttatccctagtgtacttgtaaactacgctggtgcccgtttaaatgtgagttggaaacgctacttggcgatggtaaccgtaggaatggcaccgacctcctttctctatgcctttggtggggatgctattttcaaaggcaacattagacgactgatcggtgtcgcaatcgctattttaattctaattggctgttatttactcgttcgcaaaatctggcaaaaccatgaagaaaaagcagcaacaaaataattaacttgattaaaaacaaggctccaaacgtccggcaaatccgaatgtttggagcctttatctttaattaaatcttgaccaatattctgccaaatacttgctggttaaactttctggtttttgaataagggctaacggattaccctgagccacaatttccccaccattgctgccaccgcgcggacccatatcaagcatataatctgcgttaataatcaaatttaagtcatgagtaatagtaatgattgtcgctccccgatcaagtaattgctgcattaccgctaaaagggttttaacatcaaggggatgcaagccaatagtcggttcatcaaatacaaataacgtttcactttgattatgattaaggtgtttaacaagttttaagcgttgcgcctcaccgccagaaagactaggcgtactttcgcctaagtgcaggtatcctaggcctacttcatctaataattgaagttcacgagcaattttcggaacttccttaaatacactcatcgctgcccgaacatctaattttaagagatcaacaattgaatatccctgccacttaactttttgaacttcttcattgtatcgacttcccccacatgttggacaagtctgttgcatatctggcaagaattgaatatcaagagttacgaccccgcgcccccacacgttggacatgctccctgcttattattataagaaaagtaagaaggtgtatagtgtttctctttggctaagggctgggctgcaaataacttccgcagattatccataatactggtataagttgcgactgttgaacggttagttttaccgattggcgctgcatcaacacttactacttcttttaacggacttgacaattttcgaacttgcgaaggtaatttagccccacttgcttgagcatggatagcaggaactaaactatcaaggatcagacttgttttaccagcacccgaaaaaccagtgatagcagtcagccgattaaccggaatctctccatagacgtctttaagattgtaataatcttttacttcaaaggtaatctcttgactagctggttcgtttgctatggggcgactttttaatactgctgtcccatttaaataaggaccaattttagactgagggttgtcagcgatttgcgatggtgttccctccgtaagaatttctccacctttttctccagaacccgggccgatttcaataatccaatctgcttctttgataatatcaacattgtgatcaacaactactaatgaattaccttgggccactaattccttaaatacatttaagaggcctgtaatattatcaggatgtaagccgatggaaggttcatccagaatatataagacaccagttgtttgggttcgaagagttcttgcaagctgaatacgttgtaattcacctgtcgataacgtatttccgtttcgcgataaagttaaataatcaaggcctaattccagtaatggtcgtaaattatcatcaaactctttaaataatgaggtcgccatctttttcatatctgaaggaagagcagctaaaacatcttgcttccacttgctcaactctccaagcgtaaggtcactaacttgcgcaatatttaaaccaccagctaattgttttaataattctggctttaaccgtgttccatggcaaactgggcacgttgaataatggaaaaattcgctaattcgtttttgtgctcgttcgcttttactgcttttggcagatgctaataccgcttcatgagcgttctcatataaagcattaaagtcatgaaaaacacggcctgttccagagcggaagtccatcttaaacttcttttgtggaccatttaaaacaaaatctttttctttaggggttaaatctttatatggaacatggattcgaacaccggcctgttcagcaacactcggcataaagtttcgtccaggcaaatgccatgaagcaactgccccatcagctaaactaagattttcatccccaataagtttactttcatccagttcacgaacttttcctgttccatgacatcgtaagcaggctccgtcagaattgaatgcaaagtcttctgctccataggcataaaactttgtgccgcaagtaggacaggttaattgtcccatttcatcgccgctcttactcattacctctgcgatttcaaggcttggttttaaacgatgcccatttggacagaccggttcgccaagccgcgaaaagatcagcctaattacgttcaacatctcactcattgttccaacggttgctcgttcagatggaattgcgggacgttgcttcaatgctagtgctgaaggaatatgtttaacacttgtaacatcggcttgagcacctaactttatccgccgtcttgtgtaagtagaaagcgcttctaagtagcgtcgagatccctcttcatataaaatccccatcgctaatgagcttttcccagaaccagataatcccgaaattgcgacaaatttatgtaggggatattgatatcaatgttcttaaggttgtggactcttccaccttttacttcaatttgcgttggtagtctggtttctgtcactattttttactcctttcatatcatcattccacagatggtggcaataactccaccaagataacttaagccaaaataaacagcgaacattccccatcgcctttcatccatcattgaaattagttcaacgttaaaagtcgaaaaagtagtgtaacctcctaataggccaatcccaaataatagcatgagcgatgaattactagcaaaatttttggtaagaatgcctaataaaaaactaccggtgatattaataaacagagttgctaggggccaatcaattcttaactttttccaccagcttgtgatgatataacggatcacagccccaattgctgctccaagccctacattaatcatcttgccgcgaacctccgtattttcgtgccaacataaaaccgagcagtgccaaagccaagccgccaagagagctcacaagaaaataaccgatgctagcaattataccttggttttcaagcttaacaatagttgtggctaaacttgaaaatgtcgtaaaagcgccaataaaaccagttcctatcccggcatttagccatgctgctaatagtccccgctcaataaaataataagttataaaagctaacaaaaatgaaccaataaggttggcatataaaatcccatcgccgcctaataggacactaagttcataacgggtaattccgccgaggaagccgccaatcgagacactcattattgtttttatattcataaaaaatctccttagatctgcaatcatttcattatacaacttttgctatttcaatttagaaacttgtataatgatattgatttaaaaatttaagggagacttagataatgaaaatgcgacgaattgatcacgttgttttaactgtaactgatttagagcaatcaatgcgcttttatcacgaagtatttgatatgccggtgattaaagaacaaagtaatgacgacttaattacaatgcggtgtgggcatcagttaatccgtttacaaaaaattgaccgaccaactactttaaaggcagctgatccgacaattggttctgctgacttatgtttagttgccggagatagtattgacgatattgttcaccatcttaatagctattatattgatataattgctggaccaattgtaaaacaaggggcggaaggcgaaatgacctcgctttacgtttatgatccagataataatctgattgaaattgcagtatataagaataaataaagtaaatatgagcgagagaaggttgttttccacttctgtctcgctcatatttcattttcaaaataaattcaactaaaagtaaaaagagcgtgctaccgcaaaatacccaccaatggtcacggataatcccgagatagtcacgaataaaagttaatggacagtatcgccaaggagtcttgctactaatgaatgaccagtttaaccccatcctccttgcataagctctcgcacgaagaacatgaaaatcactagttactactacaaccgtctcttgcggcttaatgagttgactagcgaaggctaaattttgccatgtattaagtgccttgttttcgcgaattatttttcttgctgggattccgtgagcaattaagtaagcagccatgacttctgcttcagattcttttgctttctgtactattccccagaaacaataatttttgcagattgatgagttttccaacaattaatggataatctccgtaacaactaaaagaataataattatgattgcaataatatagccagatactcctaaacgatagatatgtgaatcagctggtgttccctggactaataatgatgatcctaagatgactgctgctaaaataattgcaatcatgaaacggttcattaaccgttctatctgctttagcactcgttgctcatttttatactgtagatcaactttggcatccccacttacaaatgtatcgatcaattcattaattctttctggcatcttccccattgctttgctagcaaggaaaaaattgactaggttattatcaagggcagaacgccaattaaagtttcgttttaaataacgccggccaaacgattgggcaacctcaagcattgatatttcaggatcaagtttagcaaccgagttttcaagagttccaaatgccttaattagcatcgttacctctcccctcatttgaaggtggtttttcttacatagctggacaatttggtatagcattttcacgaaatcaatattgccaaggccggttgaaaaatagggttgcataaaggcgccaagttctttataaaatgcattttcgtcaacttccccggttcgattacaaacatttaaaactgcttttccaatttttcgcgtatcctttgtgttgatagtaatcacaatattcgcaatactatttgccatcgctggacttaaccttcccatcattccaaaatcaaggtagatgatccggtaatttggtaatgcctcctgttgatcataactaatggttgtattataaatggtcttttcatggtgtttggtcgttgcgtattgctttgctgattcatccggacgtaattcgtgaattaatatatttcctggatgcggatccgcatgaaagtaatgatcaacaaaaacttgttttaaaaagttattaacgagcgtagtagcaatttcatgattaacggtcgttgcctcttgatcattatcattcggctgcttaaaccgatatcgaatgctttccccttccatcgcttcattaacaagaatcttaggagcacaatacttcatatatactttaggaactaagataggtccgtcaccattatttaatgtataaaattcttccccattttttgcttcttcaagagtattgacctcacttaataatgaagtactgagttcatcaattactttatccaaatcaactactgcaatgtcttggggaacatacttaaataagaccactgctttccgtaacaaggctaaatcagtattaacaagcttaccgacttctggatgttgaactttgacaacaaccggtgtcccatccttaagcgttgcatggtgaacttgcccaatcgacgcagaagcaaaaggtttttccgcaaagctagcaaattcgtcattaattttcttcccagtttcttcttcaaaagtttgctctacggtcgcaaagctatcagctttaacctgatcttgcaagtggcgaagttctttaatatatgctggggagacaaggtctggacgggttgataatatttgaccaagtttaataaaggtcggtcccagttcttgcagtgcctgacaaatagcttgtggattagtttgatggtaaaaattgctaacaaaatgatattttcgcatcacttgcataatcttacgcaagcgtgctgacttcttgatttcttcttcattagtcgtcatgtgtcttctcctacttattttcctttattttagcattttcacttataaaaaaataattaaactcccctttcactacattttactgatacaatagtagtcgataaattttttaagaaagtttaggtgaaatttttaaacgatgaatggtttatgggattcatattggtttaaattaattatcattattttaattctgctgttagctgctttatttacactgctggagtattcagttgttaaagtgcggcctagtgagttaaaggagctccggcaaacgcgaaaagtcaaacgtgcggaacacatggtagcaaatcttaatgagtacctatcaacagctcaagtcggtgttacgatgacttctttagttttaggttggttaggtgatgaatttatcacagatctattgctaaagattaatattattccgcacgatgttcttcaagcgattgcaccagttatcggtgttttaatttttacattcttccacgcggtatttactgacttagttccgaaaaatatggcgattgatcgaccggtaccaattctcttatcaattgttcacccggtacaattcttccatactgttttttatcccttcgtttggttatttgcggtagtcgctgcggcaattacgaaaatgttaggatacaatgttcagccagaagaagacacatattcacaaaatgaaattatgaccttatcccaacaatcggaaaaagctggggaaatggataaagaagatgttatcttcatgcaacgggcttttgaaatgaatgataaagttgctgaggatattatgattgatcggacacagttagcggttattgatattacggcttcaattgaagatgcagctaaactttatttcgaaaaaaaattcacgcgttttccagttgttgctaataatgacaaagaccacattcttggttatatttttgcatatgatattatgcggcaaaaccaaatcaatccgcaacaatcagttcgcacaatcatgcgccgaattccaatcgtttacgaaaatgaacaacttaccaatgtccttgctgagatgatgaaaaaacaagtgccaattgtcgttgtccaagacgaatacggtggtacttctgggatcattactgataaggatatttatgaagaattattcggaacagttggcgaagaaattgatcatgctacctctgatatgattgaaaagaaggatcctgatagcaagggtaatcctaccttcgaagtttcaggtaagatgccactagatgattttgaacgttactttgatacaaacatcgagcaatttgacaactctgaagtaacaaccttaactgggtttttccttgaacggcagtatgacttaaaagttggccaaccaattagagtcgataatttctcattcacacctcttgatttgaagaatgcctatgttaataaattcaaggtagtttacattaagcctagaaagaagaagccattagctgatgaggatcaaagcaaggaaaaatagatattaaaaaggctcgccgcaatttaggaaagatttcctagttgcagggagccttttcattagcagttcatctgcatatcaggaatgcagttacatttgacgtggtccggcgaattagttgctttgcttgccaataattcttgtaacttagcaatatcatccttgctaagggttacattattgatcacatgttcaagggtgcttccaacgtgtcgttcacaaatattattaaataggttgtccgccgcttggtccattgtttgctgttcgggaactaagggctcatagataaatccacgtccttgacgagtggcagataaggcttttttatcaaccaagcgtcgaagtaaagtcttaatcgttgccggtttccagtcaacttttttctgtaaaatttcaataatttggctactggtcgtttgccttagactccaaactacccgcataatttgccattcagcgggagttatttctaaattaatattcatctaattcctcctgcgtttacacatgtaaattcttcgtaactatattttatcattaatttacttacttgcaaattcctaatgtgtattgacattaataatctggctagtaaactcaatactgtttgactaattttaaggagcgctatatctactaatgaaaaatcaacgcatcagccatgcattagtaatcatggtatttggtacatttttcggtcttctctgttcaaccttaatgaacattgctctcccaacctttatgaatgtctttcatatcagtgaggctcaggttcaatgggtaacaaacgggtatatgcttgtcaatgccctaatgattcccgttagttcattccttataaaaagattccctttcaaaaatctttttattattttctctggaatttttcttctaggaactattatcggagcgattgcgtggagcttcaatctagttgtaattgctcggatgattcaagctctgggtgcaggaatgatgatgccactagtaaatgtcttggcaattcgttacgcaaaaccgggtaaaaaagggcaaattatgggaattattggtcttgcctttaattgtgcccccatcttaggccctgctatttctggctttctattacactttttctcttggcgataccttttcctattaattattccctttgcagtaattacattactactttcattcttcctgcttcctaaaatcccacataatgaacatccccgctttaatacattggcccttattttaatcacaggcggattatggtcattattaatgggcttatcaaatgtttcgaacagtcacttgctttcatttaatgtcgcagggtatgtccttatcggcttagtctttctcttccttttctttcttaaccaacgtcacagtaagcgtcagttaatcaactttaggatcttctcccacaaacaatttgtttttgccactgttattaatatgctaattacatcaacaatgtacggtaatgcaattttgattcccctgctcgtacagattgtcttgggcaaaagtacggttatttcagccatcgctgtccttccggggcaatcttaacgggtttactatcgacaacgagtggccgcttttatgacatttatccaattaagattctcgttgggactggtctcataatcgatatcatcggaacaatcggtcaagccgcaatcggtgcgcgtagttctgtcctcatgatcactcttttccaaacaattcgccagtttggattagtgacaatgttaatacctctgcaaacacaagcattatcattgctacctaatgagatcgttcctgatgcagttgctacctttaatacgttacgacaaattgcggctgcctttggaactgccctcatcgtttcaattgttggtattgttaatcacttagttcacaacccgtcctcacacctcggtattcaagccggcttccttctatgcttatgcctgctattaacttcgctataccttagcactaagctataccataaaatttcttcgcaagcgcaattagaaaatgcgtaaaacaaaaaccaagtaagatcccttttgacctcgcttggttttttgctatttaaaaatgcaaattcaatagcgttacaatacaataggtcatcccactcgcgataactggaccggcagcaattcccttaaacgcaactactccaataatcgttccaagtactaaggcaaccgtgacttgaggaacagctgccaactggttgactccatacttcgataagatggcaactgcaatacccatgccgactgcaatccaaccagcaggggtcttaaaagccgcccataaatcatcaaaaccaatttgccccgtcgcaattggaatcaagatcgcaactgaaatcactgttacaccccaattaattcctttatgctgtatcaggggcaaccacttggcggtataagggatcagtttcaaaaccattactactactgtggcaataatcaatgacgagttatgaccaaagattgcaattaataatactaaagctaaaaaaagccagctttccatgtaatctcctcctcaaactttacctagtatatcaaagttgaggacgaggacaaaggaagctgactaattaactaatcagaaaggcggctgtgagtagcgtcatctacttcttcgcaccattcgctagttcccttcgtaatagcaatatgagagaaccaactatctttagtagctccatgccagtgctttacaccttcatgaattgctacaacatcaccgggttttaacaattgcgccggcttgccttcttcttgataccaaccctcaccagcagttactaataagatttggaaaccatcatggtgaatatgccagttgttacggcaaccgggctcaaaattaacgtttgaaacatttacatcaatgttatcatcaggagatactaacccattgagataacttgttccaataaagtattttgcaaatgcaacgttcttatcaccaaaaccaaaaaggtcattttttatttcgtattcattcttagccattattactaacatccaattaattgttggtttaataataaactctagcattaagaatgtaaaaatcttattataaatggtgagttattcaaaaaatgaattataattttcgcaaccatgaaaataatgacttttcattgaaagctggactaccatgagtaagaatatggtagccgggagtgacatttaacttaccagcatagttgatgaagtcctcttggtaatcaccagtgttactccaacctgtactaaacggcgcaatcttaccagtgaatttttgaatttgttgaagtaagtcaatgattggtgagacaactccgccattccagactggtccaccaactaaaatcaaatcgtaatacgataagtctggtaaggtggtcactagtttagggaaggcatgtgtcttaagctgttgctgataaattcttccagtttcttccatatccagtggaaaagtatcatcgggaactttaattctcacaatatcggcaccagttgcttcatgaatcttactagcgagtctagcagtgtctccgaattgcgaataatataaaattgccattatcaataactccttaatataaataaaaatgagggataccatatggatacacgtgtattaaaatactttttaactgttgcacaaactaataatatcactaaagctgcggaacaattacatattacccagcctaccctttcccggcaaatcatggacctagaaaccgaattagacataaagttgtttaaccgagaaaaccggcgccttcagctcacaaaagctggaatcttatttcaacagcgagcaacgaccatgctacaactcttggatcaaactgaaaacgaccttcatcaacaagaagaggcattaacaggagaaattaatctcggctcagcagtttcgagtgtctctccttatataacgaaaataatttttgaatttcaaaagctttacccgaacgtaatctttaatttatctgatggggatggcgatgtccttcggcgtcaactagatgaagggctcaatgaccttgtatgcctccttgaacccgttgaagctgctaaatataactttctcgaattaccggtccgtgaagaatggggagtaatgatgaaaaaatcggccccacttgccaagtattctactatcaccaaagaagatctttacaaaattcccttaattcttccccaatgtagtattgttcgcgatgaagttagtgatatcttaaaattagatcaaacgcgtttaaatatccgtgcgacaactagtttacctggaaataccgtttcacttttaagaaatagtaattactatggtctgacaattaagggcgtctataataattttcatgatcctgaccttgtttttgttccccttgtacctaacaaatcgacaggggatgtccttgcctggcgcaaaaataccatcttatctccagcaatcgaaaaatttcttcagtttgttaacgagcaaattcaaggatcctaaagtatttaatgttataactgatttagaaaggggaatttaattaaaatgaatcaaaatctacaaccaaagataaaattaaacaacggtcacctcatcccccaacttggcttaggagtctggaaagcctcacttgcggaaacacagcaaatggttaaagaggctgttatgaatgattacgtcttaatcgatactgctaaacaatatgggaatgaagcagccgtcggacaaggcattcaagatggtttcaaggctactggccgtgaacgtgatagcatctttcttaccactaaaattttcaatggtgatcaaggagattatgataaacttcggcaagcagtgaatgagcaattaaaaaagttacaaacaaactatgtcgaccttctccttcttcattggccagttaatgataaatacaatgaaagctggcgcgcgttagaagagatttacaaggacggtcaagcaaaatcaattggtgtttgcaattttaatgttgaacgaatgactgatttgctcgatcacgccaaaattaaaccagcaattaatcaaattgaattcaatcccctgattcaccagcctaagattgtaaagttttgtcgagaaaataatattcagcttgaagcctggtcgccactaggtaatggtcgtcttctttccaatgatgttattaagcaaatcgcagacgagcacaaaaagagtcctgcccaagtaattcttcgctgggaaattcagcaaggctttatagttcttaccaagactactcatcctcaacgtatgcaagaaaatgccgaaatttttgactttaccctatcaccggatgaaatgaagcaaatcgacaagttagatcaagaaaagcattctatctggtatgataagttcaagtggtcaggaaatccggacggtgtagatgactatattggtaagccgggcgcattttgatccaaccaatttcatatcttttaccataaagggcacctctaaacgagtgatgccttttttattagctaaaattttctagaaatgttcatattattatactataattaaaatcattaaaagaaagagaggattctttaatgaaagctgttgtatctgttctaggtgaagaccaagttggaattatcgctaaggtaagtgcccttcttgcccaaaaacaaattaatattctagatgtttcccaaacaattatggatggcaatttcgtaatgatgatgtctgtgatgatccctgaaaatcttgatagttatcaattaactaatgaacttacagaacttggtaaagagattggcgttgaaattaaccttagaaatgccaaaatttacgatgccatgcataatctttaagatatacaggaggaatatcacttaatgaattcacaacaaatttatgaaaccagccacatgatttctaatgaaaacctcgatgtgcggacaatcacgatgggaatttctttgcttgattgtatcgatagtgatagtacggttgcatgtcaaaagatctatgacaaaattacgacaaaagcaaagaaccttgttaaagtcggccaacaaattgaagccgaatatgggattccaattgctaacaagcgagtaactgttactcctatttccctcattgccgctgcttctcaagaccacgactatgttaaatatgctaaaaccttagacaaagctgccaaaacattagggattgattttatcggcgggtacagtgcgctggttcaaaaggggtaccaaactggtgaccgtacgttaatcgcttccctccctgaagcattggcggaaactgattttgtttgtgcatcagtaaatgttggctctactcgtagcgggatcaatatggatgccgttgcacaaatgggtgaagtagtcgtcgctggttcaaagcttgatatgatgacaaatgctaaactagttatcttttgtaatgctgttgaagataatcccttcatggcgggcggatttcatggtgttggtgaaccagatgtagtaataaatgttggtgtttcaggacctggagttatcaaaaccgccctagaaaaagttaagggcgaatcaatggatgtcgttgctgaaacgatcaagaaaactgcctttaaagtgacacgaatgggtcaattagtaggaactgttgcagctgaaagactgggcgttcaatttgggatcgtggacctttccctcgcaccaactgctgccgctggtgattccgttgccgaagttctagaagaaatcggcgttgctcaggttggaactcatggaaccaccgctgctctagctatgttaaacgatgccgtgaaaaaaggcggtattatggcctgcagtcatgttggtggtttatcaggcgcattcatccccgtctctgaagatgctggcatgattaaggcagttaacgctggaacgctaaatatctctaaattagaagcaatgactgcagtttgttccgttggtcttgatatgattgcaattccaggtgacacgccaaaagaaaccattagcgcaatgattgctgatgaagcggcgattggaatgattaataataaaaccactgctgtccgcgtgattcccgcacccggcaaaaaagttggtgatacggttgaattcggtggtctattaggatatgcccctgtaatggcagtcaataaagccgcaagtaccgcaatgattaaccgtggtggacttattcccgccccaattcatagtttcaaaaattaatttaaaaaatagcgagagattaggaatccctagtctcccgctattttagtgtttaattacctgttaataaggcgtaaacatatgaattttcttctggacggtaaaccccgtgaagttcaccaactttagtaaagccatttttgtcgatcaagtgttgcatgatcttgttgtcttcatgagtatcgatccgaatagtcttaatatccttccgattattcttaatgtaatcaattacactagtgaataatgctgaggcatatccttttccagcatgattggagtgaattgccacacggtgaataacaacataacgatcagtgtcaattaaccaatcaccgtcaagttcatcatatgagtgatctggtgcttcaacaattgataatgcaccaacagtttcatcatcttgtgattgtacaaggtatgcaaatcctttttcaatatcttctttgatatgttcttcgttcgggtaatctccttgccattgatcgatcccttgttcagctaattggtttcgaccatctcgcagaatttccataatttgatttaaatcatccattttggcttgtttgatttgcatcgtattaccttcccttctcattacattaattagatgtgttattcgtttagcaaccctaatactgtaacatattttacgttttaaatacaactgttaactattaaaagatgccccttcaatatgctatgatagcactaaaaagaaaaagaaggcttctatatgatcaaatttattaaatttactttaacaatatttactgcatttttcctaatattcatttatggactagcagcaaatccagttcatgcagatctctcaaataaatatattcattctactacccccaccctctttttccatggctacggaagcggtgcccatgcagaagaatatatggtaaatggttttgtgaaagcaagtgtgtcaaagacagttatcaccgcagatgttgctggcgatggaaccgttactcttaaaggagatattcctcataacgccgtcaatccgctcgtgatggtcaatttcaatgataaccatagcacaaattatgaattacaaggacaatgggttaagaacgttcttgaagaactgcaagctaaatatcattttaaaaaggtaaatattgaagcacactccatgggaaacatggcagttatgtattttctgcttgctaatgccggcaaccataatcttccacaaattcaaaaacaagttgcgatggctggagcctttgatggtgcaatcggttggaatgaacctgctaatctaatagtgaataaaaagacgggaaaaccttccgcaatgaatgattcctatcaaaaattacttcccttacgtcaccgctacccacggcaaattaaattattgaatatttacggtgacttaaaagatggcaacgatagccaagtttcaaacgcttcctgtctttctcttaaatatcttattaataaccgcgcacgttcataccgcgaagttaagattactgggctaaacgctaaacacgaattacttcatcataatccgcaagtcaataaaatcttaatcagtttcttctggggaaagtaataatgttgcactaataagtttattagtcatttgaaagtagtttttgtataaagcagtgtaacgaccactatttttagttggcagccatggcttgtctcgcccgcaataatggagaatcacggtattacgcattacccaatcggttgtccattcaccaaaggaaatcgtttcgtaaataccgcctttacgagtatcaaaattatatagttgatcagggaaagatttaatataacgtccatataaggcattcaagacgtcttgatcaggtaataaaagtgtatgggtacggatgtagttaaaaatatccgtatcctttacttttttacggatagtatcaaggttcatcaagagaacgccagaattataatacccgtcagcatcaaagttttgcagacgaatcttattaataacctctgtcgtattcgtcaggtttgtatggatggcagaagcatataggtatccctctaatgaagtctcatacagacttgaaagatcattaatacacaatacatcagcatccaagtataaaattttatgcaaatcttgaggtaaaagacagtgtgctagtaaacgataataaattgttgtcggatagcggtctgtaactggtgctttgctaaataattgatcattaactttgattggaaaatagttcattcctaattgcttacaaactctttccaagtcttcagttcgtttcaatttctccttttgtaagacatatacattaaattcttgtgcatgagtatttaacttgatcgataacaaaactgttgctaattgcgtgacaaatttgtcgttaattgaaaataataaattcattttattccacccctcacatcttattctacaaaacgttgacgtggattgcgattcagtatttaataattaaagaaccaatcaagaatagaggttttatgatgaaacaagcggaacaattaactgccattaaagagtacaccattcaaaaattaggtcaggacaagactggacatgggatggaccatattaaccgcgtagtaaaaatgagtaaacgattagcaattggtgaaaaagttgatccctttttgcccatcgtggcggcctaccttcacgatacaattgatgagaaattagttgacaacgttgaggcagctaaacaagaattagttgattacttaaggcaaaatgactttagtgatgaccaagtcaaaataattatggatgtcattaataatatttcttttgctcataccttagataaagaggaagtcaagctctccatcattggacaaatagtccgtgatgccgactggttagatgcaatcggcgcaattggcattacgcgggcaatttattatggaggtggccatcatgaaaaaatatacgatccggctattaagcctcgtcataatatgtcccgggaagaatatcgtaatttagcaaatgaaactatcattaatcactttgatgaaaaactcttacatctaaaagacatgatgaacactgaaactgccaagaaaattgcaaatcaccgtcaacaagtgatgctcgactttcttgatgaatttcatgcagaatgggatgcaaagatgtaaattatttagagaaataataaatgccttggaaaacttgaatgtttttccaaggcattttgcttacttatcatcttttttatttttagcacttcttaagtcgacaataatcgaaccgccctgcttatcgcctgcagagttacctgaatcattattatgattattatcaatatgcaatgcttttcgcgctacccaccgaaaaatcaatgagatcggtgctaccaggaagccatacaataatcctgtcagtaatgcattaggaataatcagttgaacaaatgttaatccacctgttggcgtccccgttaggactaatccaattagaccataaaagattgaaataaagaataattgaactagaccggtaaaaatagcaagccataataattgtgaatgattgagatcaatagataatggaacttgtctgcgtaaaatcaagccaaccacaatcaaaataacaataaaatcgactaatattacccagtcagcagttcctaagacaatcatgattatggcactaacaagcgtcacaataaatgcaatattaattcccaatgcaactgctattcccactgcaatcacgccagctaaaggcataaacgccttaccggtcggcaaaatggtttgaaagccagtaaatgatattaatatcatcaaaatacccgccgtaattgccaaaagggttttaattaaggtttgttttttcatgctaaaggcttctttgctgtatcttgcatccatgctaaggccagggctccttgtcctaagtgggaaccaattactggaccaaagtaactcaactcaaatgaaatatcaggatgatccgcttgaagtttatcaagccacttttggccttcttctggagcatttgcgtgaacaaccatcgctctaactggatagtcaagtttggcaatatcctcatcaaagatttgttcacagcgaagtttagcctttttcattgaccgcaccttttcaaacgcttcaatggcatgcgttggagtatgcatagtcaggagaggtttgatttttaaaattgagcctacaaatgcagaggcgtttgataaacgaccaccacgaacaaggttttgcaagtcatcaaccacaaatacattattaaaggtatcacgatattcctttacctttttaacaatgtcatctaaatcatcgccttcactagctaatttagctgcttctaaggctaagtaccccatcattttaactgttaggtgggaatcaattggtacgatcttgattgtatccttcatctgctcagcaagttgttcaacagtatccaaatatcctgtaatagcccgtgttaaatgaatgctaatcacagcatcatacccatcatcggctaatccttggtaaacttccatcaattgaccgattggcgtttgagaagtcgttggaaaagagcttgaatttgccatcttttcataaaaatcactggtggaaatatcgacaccttcacggtatgtttgaccatccaatgtcactgggattgggacaacatgaatattattagccgccgcctcttcaggagaaaggtaggcagtgctgtcagtaacaacagcaattttcatcttatcaactccatgttctaaatttgtataaggcagattgcaagaaataacttgaacaaagttagtgacgcagattacgcaaaaagatctcaattggtgtgcgccagtttaaacatttgagtggcctggagttcaaataccagttaatttgaattaactcatcatcagtgatttcctcaatcggttgacttttaaggataaagcgtcgtagtactcggttgcgattctcattactgccccgttcatgtggagaataagcatgcgcaaagtagaggggaatcctggcctgctcttcaattagcttgtagttagcgaattctttcccatggtcaacagtaagggtcttgagattatcttctaactggttagctaattctaaaatggccttggtcattgaggtactatctcgtccctgaagccgtttaacgatgataagacgactcttacgctcgacaaacgtagctattgcttgacctttacgctttccagataaaactgtatccgcttcaaagcgacctgaggtatgacggtcaataacttcagcaggacgatcttcaatggaacgtccatggctaaaagtcccacggggttctttggctcgtcggcggcgaattccatggtcaggtaaatcagccacgtcaatatccaatactccttgatcaatccagttgtagatggtcttgtaggcgattctaactacatgagccacttgttcaatcgaccatttttggatcttaatcttttcttcaattaatcgcttgaggttagtcgttaagatggttttacgcccacgatgactaagtttagcttcatgatcagcttgagctttaactgcgtgatattcaccagtcaaacgatgaacctcattaaagatcgtggttttaccgaagccaaggtaatcagcgatgtatttaagggagcggttttcataacgaagagtttcgatgacaacacggtcttcaaatgataaaatagtggtgcccataaaggtccttctttctaatggaatgttgtggtaacaccattaaagacctttatgggtttttatgtccactaatatgttcaacttaaattttacaatctaccataattaaaaataattgcgtttttacgcggatttcacccacataatacaaaaagcataccacattgacggccctaaaccaaccaaaaatatgtccactaaagcatcattacttttcattaatgatgtaaaactgtataattaatagtgctattttcgtttgtaattataatatttaggaggctacactaatgtcttttgatggcttgtttactcatgcaattgtccatgagctagatcaaaaattaactactggtcgggtagccaaagttagtcaaccttaccctgcagaattaatcattatgatccgtgctcaccggcacaactatccattactcatttctgctaatccaacatacccacgaatccaaattactgagatcccatacaaaaatccagcggttccaactaattttacaatgacgatgcggaaataccttgaaggtgcaatcgtcaataaaattgaacaagttgataatgatcggattatcaaaattacctttgacactcgtgatgaattaggagatagccaacaattagttcttgtgagtgagattatggcccggcatagtaatatttcactcgttaatctcaagacgggtaaaatcattgacaccattaagcatgttggctcagatcaaaatcgggttcgcctgttattacctggtgctacctttgtcatgccaccaaagcaagataaagttaacccttacttgccaaaccagatctactctgatcttgtaagacaaaccgatgacacagtagaattaagtcatcagttacagaagcattatcaaggatttggcaaagactccgcacgggaattagctgcagaattactgcaaagtgataatttaccagctacctatcagcactttcttaagcactttgaaaatccagagccagtattaatcacccactctaatggaaagtctcaatttgctgtgttccctccattaaatattgatggtgagttgcaacatttcgactccctctctgcccttctcgatgccttttatgctaataaagcagagcaagatcgttccaaagaattagctgggcaagtgttaaaggtattgaagaatgagctaaaaaaagatcggcgaaaagtaaaaaaactgcaacaacaattacaagatgcagcaactgcagatcagtaccgaatttgtggtgagatccttactacctatcttagtaaattaactccaggaatgaaagaaatcgaacttcctaacttttatgatgataataagccactgaaaatcaagcttactccagaattatcaccatcgcgtaacgcccaaaagtacttcactaagtataataagcttaaaacctctgtcgaatatgtaaaggaacagctaaaactgacaaatgatgaaatcaaatactttgaaaacattgaaaatcagattaaattagctgctcctgctgatattcaagagattaaactagaattacaagagcaaggttatattaaaaagaagaaaagtgggaaaaagcaacgaaaagttaaggtaagtgccccagaagagtttcatactagtgatggcactacagttttagtaggtaaaaataacctacaaaatgatcgtcttagctttaaaattgctaataaaaatgaaatttggttacatgttaaagatatcccaggttcccacgtggtaatccgctcaacaaacccatctgaagatacgattctagaagctgcacagttagcagcatacttctctaaaggtcgcgattccgataacgtgcccgttgattatctccctgttaagcgacttcataagccaaacggagctaaacctggatttgttatttttacaggtcagaaaacactttatgtaacaccacataagctttctaactaaaaagaggctgggaaaaaacttttgttttctcccagcctcaactgcttttatgaacaatagaaagataacgtggaactagctttgcgtcgccacaaggcttgagtctaagtacggacgataatcagcccgtgccgtgctaatcatcgtcctagcttagccaaccgccttgtcgaggaggttattttccacttcttttttatatctcccgaaatgtcaatttaagttagaaagaaagtagttgctcatcagtgacgtaggacatgaatacctcatatggagttcgatagcctagtgatttgcggggcaggttatttcgcttactcatcagttgggtcaccaattcatcaggaagattgcggaaatctagctgttttgttaagccgtcccggcgtaaaagaccgttgttgttttcgttcagccctcgttgattgggagcaccaacctcggcaaagtaagtgtgaaggtcaaattgattggcaatctcgcgccagccggcgaattcttttccgttgtcaaaggtaatcgatttgaagaagtgctgcgggaatttccgaagccactgacctaagtgttggttaatcgcatcagccgtcttttcgtgcacattgagtacaatttcgaccttcgattggcgttcggtcagggtcattaccgccccttggtgctttttgccttggacggtatcagcttcaaggtgtccaaattcagtggcatagtgcggaaagtccttggcacgctcgtgaatacttcgccccaattggccagccttcccgcggcgctcaatatagccattcgggtgccgcttacctcgcatgggcaaagcacggacatccaaaccgaactgcccccgttcaaacatccggtaaagagttcgccggttacaactaattgggcgctcagcgcgcccaataatggtgtcaggcgtccacccctgggcaattttgtcgttgatataagtaagttcagccagtgacaactgagtacgttttcggccacaacgttgcttattgcgcatatagtgatcttgataatcagcaattgaggcaccggtttccaggtaacgataaacgcgataaacggtttcggcgctacggttgatcatttgggccactcggtacgctttaagcttttgcacgaaagaatgggcgatgattgtcagctcgtttgtggtaagatgggtgtaagtcatttgtggtttcctttcttttgtttaggggtattcaaaagtctaccacaaatggcttttctatttttctaacttaattttacaaacggcgtctctaaattattctcctaaaaattgcatctgagcaccaataactcggttgcgggcagggattccacctttgactcgcaacgccttaaatgggaaggttgcacgatagttaacaatccctgataccggtttgggctccagcattttatcgaatttaccagtgaataattgagtaaaaattcctggtaagctaatatgaagtgcttttgataaaaaggctacttctggcaatgataatggttgaactttaattaaattaaattcaccatcattctcttcaaaaatcacttggtataatcctggctgttccagctttaacacagcaacactagcctggtcattgagattttggtaagttgacgaaggaagatcagccgggtagcgtaaagcggtggattgatagtttaacgcaattggtgaaaaaagatcagtcattgttcctaatggataagcataattaccatcatagacataattgaaggagtaacgttgcctatcgctactagcagcagtagttggcaattcatctggaattacgatgatttttacatccaagtcataattttgcaatgatttcaataatttactataactagcaggaataaacaaatactggggttgctctatccgtaatatctgcaaaatattttcaatcgttactggctcaacatagcgcttttcagctaactctggattaaacgtaactgaactaggattcgaatttacaatgacgttattaaagccctcattatgaagctcttttaacatcatagcaacaaagtaatcaccagaattacttaatcctaaacgtagtccccccgttccaattacaagggcatttggttgggaagttcggctaatttcattttcttcttcataagcagaataaaaactattagtatgttgatcaaactccccggccgatggttcgatttccttgtactttgtcaacaattgatggtctaaactcatctgataaacttgctcagaggtagttttccatagtcttgcaataagctgattgcttaatccgtaactctttgctttttgtaaaaccggttctttatttggatgctcagcaatttcccgaatcaacaaccgcattttattaatctgttcaaaataaaatgggtcaatctttgtcatctctgctaattcgttaactgaatatcctctctgcattgcttcaattaatacaaaaagtcgtcctgcttctgggtggacaattttggcgattaattggtcatcagtcaattgcttttgagcggcaagatgaaagtcagctggctcgtgataacgggattcaatagctttaaaaagtgcttcaatagtgcttcggccgataccaaaaaccgtccccaccgaccgtttttctgttccaagtaaacgactagcttttggtaaatcgttgaatccccatattggaacccgtgcagcaatatgatccatcgttggttcaataagagccgcatgatgaacataattttcgccaagatcaatgtcccgcagatgctttcccgcatataattgtgctgttacttgagcaattgggtaaccagttgactgcgacacaaacgctgtaattcgatcaaagtatggactgctcttaatgacataaaaacgatcactatttgtatccagggcaaactgaatatggtttgtaccaacaattcttaatttgcgagtaatagcaaaagccgtatcccgaatatcctgaatctgccgatcgcgaagtgtttggacaggattgaaagcaatcgaatcaccagcatggataccaattgggtccatatcctcaatcattgacaacatcatcatcgttccagaactatcacgttgaacgactacttcaatttccttatagccagcaagactttgctgaactactacctgttccgcacgcgactggctcaagcaagcctttaccgcatctgccaattcacttcgatcatgcacgattttacgtgtactgctactcttaggtaataccgaccggataataactggatatcctagtttagttgcctcatccaaagcatcctgataattattaaccgttacgatttttttaacaggtgcttccatttgacgaagggttctttcaagtaaaaccgcactattaatttgacgaatagttgcttcagggactcctagcaattgaatattttctttacgaataatccctttttctagcaattcttgggtaagttcaaaagcccgacgatttcccagtgtaggtaagattgcatcaggatgaaatttattaataatatccattaggctttcgacttttagtgggacaatacaaccgtggtcaacattttctaagcttactgaaaatgggttatcatctgccaagattgtttttatcttcatttgcttaaaaacgcgtgagacctggtaaatagcagagtcgagctcatcaccgtgttgaacatcgttggctcctgctccaataatcaatacagatttcaacttttccatcaatgacgatcccccctcctattcattgtatcaacgaactcatcaaacaagccatcagtttcatcaggccccggtgcaccatcgggaaagaattgaactgaaaaagctggatagcgacgatgacgaagcccttgaacactattatcaagcatgtcaacgtatgtaataaaaagctgggagcggtcaaccgaattacgatcaatcaagtatccttctgcttgagtcgcatagacaatgtggtcagtaataatttcatgaattgggtgattcaccccatggtgttcgaccgaaatttgctggacatttgctccattggcgattccgaataattcatgacctagtccaatagcaaacatcggtactttggtctggacagtacgaatcatttccaggaccgacctacgaacattatttgggtttcccggtccacttgaaagtacaaccccatcaggatctaaccgtaatatttcttcagccgttgcagtatatggtaagacagtaatattgcattttcgtcgactcaattcccgtaatattccgttctttaatccaaagtcaatcacaacaacacttagcccggttccaggattaggatatggcttaggagtagagacttgagcaacttgctggttcgttaaaacagtcgcatgaagctggtcaaaagcgtgatcatctggaactggaacaatacttccttttaatggcttttcagcttttcttaacttatgaactactgctcgcgtatcaatattagcgattccaggaatattcatttgttgaaggtatttatcaagtgtcaattgtcgtccattatcatcggtgccagcatcggcaagggaacgaacaataattcctttaattgtcggtacaatggattcataaatattacgttgaatgccgtaactcccgatattcggctgggtaaaaacgacaatttggttattataaacctgattagtgataatttcttggtaaccagtcatactggtgttaaaaacaacttcaccaaaagtaacagctggtgaaccaaaaccttcgccagcgaaaattgagccatcttcaaatattaggtatcgtgctgtcactgtcccactctcctaaaactttgttaataattgatcaatattattatgaacgttctctgaattaaacacaataattttattggtctgtcttacgtaaatgttcaagcatttttgtgaaataggctggtaatggagccgtaaaaaccatttctttgcctgttcgggggtgtttaaagcctaacaaacgagcatgtaaatattggccgttgccagtaagcgtttttcgcggtccatacaacggatctcccgccagcgggtgaccaatatatttcatatgaacgcgaatctggtgagtccgtcctgtttctaactggcaggcaactaatgtgtaattcttaaaccgttctaacacattaaaatgagttaccgcatgacgtccatcaaccacaactgcctgcttcttgcggtcctttaacgagcgacctaatggagcatcaattgttcctttatcttcttttataactccatgcacaagcgcaacatattctcgtttattagtttttgcttttaattgagctgtcaaagaacggtgcgccatatcatttttggctaccatcaatagtcctgaggtatccttatcaatccgatgaacgatccctggccgaaattctccgttaatagttgatagtggtgaatgatataaaagagcatttacaagcgtatggtttggatgacctggtgcaggatgaaccaccatcccctgcggtttattaacgacaataacatcatcatcttcatatacaatatcaagaggaatatcctcaggtgttaaatcaattttttgtggttcttctggaattatttggacgtggtcacctacaagcaacttatatttaggctttacttgttcgccattaacaaggacgtgaccatcttctatccaatgttgaatttgtgatcgggaaaattgatcaaagtgatgaccaagctgcttatcaatccttcccaccatctcaccatcaattgttaattctaattcttcagacatttgttagtctttctcctttaagatgcaaattattagccagattacgccaattgttaagcacatatccgcaatgttaaaaattgggaaattaataaatgttgtttcaaacatatccacaacatacccttgtcttaaccgatcgataaagttgccaattgttcctgccataatcaatgataagccaattagcataggaatatttttacggtactgccagataaagtaaccaattacaataatcgcaacaatagttataatggtaaaaaaagtttgttgcccttcaaaaatgctccaagcagcccctgaatttcgtaaattagttaactcaataataccaggaattaactgcttactaccaccaagaacaattgaagaagcaacccaagattttaataattggtcacaaattgttaaaattaaaataattacaatagcgatccccagtaacaattattgaaccccctgttgtttcaatgccaatttcaagcgtgcaattgctttggtggtaaaggtaaaactcattacctctccattcacagtaattgtcaccgtatgcttggtaaactctggctgacgaatatcagagattgggataacgaggtactgtttttgtaacaaacgattaaacaccattttagtcggagtgattactacggttcgtcgccgccattctaataaggcaaggattacaaaaactgcaaaaaagagcgcgctgagccactgaaaatgagtaatttcaagccaaattacgagaccggcaataaagaagagaaaagtccaacaccagctaataattgtccccgtaaggtctggttggtaaaaataacgagtttcttcttccataattataaatgtcatcctttcagaaaagaggtagttttatgatcaaaatctttacagatgctgcaacaaaaggaaacccgggccctactggtttgggaataataataattgccaatcataagcaaattcagcttgcaatcccagtagataaggaaagcatggataatcaccatggcgaattcgctgcagctcactttggatttaaatatttaattgatcactttagcaataatgaaacaatcctattttatactgatagccgtatcttaagtgacgcaatcggcaaaaattatacaaaacattaccaaaaagaattagcagcattaaatcctcttctccaacactttccaacagttgttacccagtggattcctgaaagccataatcgtggagcacataatttagcaaatcaggccctccataaaatagagtgattttagaaaacatcatatcgttttaattatatcatccacgtgttctatcagccaccaaacagagaaaaagccttagcggtcgttacaatgtaactcctactaaggcttttattattgggaaaatttgccccctagcacctattttcgatctttcgaatcgcttggaacccttgctatttaagggatttgatcttggagcgatcttttttgccccaatattggtagagatctgttcgtaaagcaccattataaagtttacgacgcttggtagcgggtgcgccataataattttcaaattccatatcagccgtcaaaatatatttactccatgtggttaatggacgatataactcacccatctgccggtaaagttcatgaactgattccttatcacttaaccgttcaccatatggcggattagcaacgataactccattaacttcgcttgtttgccagtcttttacggctaattgcttaaacgtaatatcgtgagttaatcctgccgcacgagaattttcttgagcaatatcaatcatattctgatcaatatcatatccgtggatatctaattcgatatcataatttgctaaggaatcggcttcatcccgaacttcatcagataaaccatctggaactaaattaacccattgttcactaataaatgaacggttgatgcccggcgcaatattatgaccgtataatgcggcttcgattggaatcgttcccgaaccacatacaggatcgacaaatggattatctgggaaccagtaagccagcatcaccaaggcggctgccatattttccttcaacggtgctccacctttatttttacgatatccacgcttaaaaagcccttctccactagtatctaacgtaagaagaacatggtctttattaatcgctacttctaacgggtaagtggcaccagtttcggctaagcgagtccgacggtggtatgcattactgaggcgttgaacaatcgcctttttagtgattgcttgaacacttggcacattatgcaattgtgagttatgactttttccttccactgggaaattcgcgtcaattggtaacaaatcttcccatgcaatgttttcagtacgatcaaacaattcttcaaaagaccgagcatcgaattcaccagcaacaatttttactcggtctgcggtccgtagccagagattagtccgaatgacatccttcattgtcccttgaaaacgcacccgaccattttctactttgacttcatagccaagatctcttagttcttttcctactaatgcttcaatacctgcagcagcagtagcaattaactgatatgtttgcacattaaacgctcctttagacttattcctattagctattttaccttatgttgctttaaaatgaaaagaagacgcaagaagaaacaaaaggaagcgagacagaagtcacttgttactttgtttttcgacgcgaaactagcctctgggagacctcgcaagcaacaataggcctccaatgtttggcttttttgccggacgttggaggccattgttgtactgcgtatttgctttttatgaaagtaacttaacttatgtcacaatccctttttgtttatgaatggtagttgactttaatctaactacattaatgaattctcatttactttatcagttaatattttataaacgcgttctatgtcccaggtggtgccacgagattcaaatgcgtccaataaaggcaaaccatattctttggcgtatgtcttggcagttattacatacatcttccctaaggttaagttcccactgccaattattcccgcacaacatttaacattgtcatagctttccaaataatcgtgcattggtgttgttaaaatctctgttaatgtcggcgtaaatctacttccaccaatcatatatgttggtagtaaaacaaaaaatttactatcgctttcagtcggaagtgtctcctctgaaatctccaataaatcgactaaaggattttcattattcaaatgatgttgttgcgttgcgtattcttgaagccgatgagtaaatgaccgtacattcccagaaaacgacatatatacaatttttattctcttattatccataattccctaacttcattatctaattttattaatcaaaagataagctaatttacaaataactcatttctaacccctttaacattataggcgcacttgcaataaaatgaaacgattatttatattttattgctattttaagtaatatctatcttaagcttctaaaatttaatttatcgccatttaactttttacttcaagcgagtaattattaacgcattctacaaaaagagaaccaataaaaccatactctgatttttaaaataaaaaaacccgagcgaactcgggtgcctgtatgcaagtatctgtaggccatgttttgtcgtaatataattatcaggcataattatatcgaggtaatcatctatctcagagtaccgaaatactctcccctggaatcacttcaatttgttatccaaagctcccctaccgtagtttgggtttaccgcttgaggggtttaccgcgttccaccaatatcgtttccaacattgtatcgtcactgtggcacttttcaggaatactaagacatagttaaaaccttagtccgtttttccgccgtcaccataaaatggtgccccgccttattttttcagcgagcacaaacactacaggcatcgcagcctgtgcgagcatggaccttcctaacacaacataagctgtgctcaattacccaaaacttgcaaaattattaataaactattcgacacgcactaaagcaaatgtgagtcattattatcattaccatctaactgtgaaccaaatacacgacgttctagattagatagacgctttaaaatatccatatttgtagcgctcgatacaggttgtcgggaagtagtttggctactcatagatgaaccaacttctacttgacgatttaattcatcaacctttgctctcaaacgttcattttcatcatttaaacgttcaagttctttgttataggtgtcgtagtctttaataacatcatctaagaaagcatcaacatccgcttcatcgtagcctttgccaatatttctctccttaaattgcttgtgcaaaatatcttgtggagtaaattttatgttatccaacttaaacacctcaattgtttagtttgcgtagtccaataactataataccaaatcaaagaaaaaatgcaagattaaaattcatctttttccctttgacgctcggcccattcttctgcctcttcttgaagttcatcaaaatcaacaagcgtcatcgaatactcactttcttctatatatttttgaatcgtctcataatcatacttagtttttccttcatactctggatcgtaaagaagaaaagcctcatcagtatgagtaagcataaactgctgataattccgtaattgttgtggcgattgataaggtttatctgaaacattagcaaaaaaatcaacttgctgggtaatatttgtcagcttcaactgattactttcattccattgcttaccaaattctgcaaagggaaacattaaagctgtttttaattgtggaaaatccgcttgaaattctaaagcagcttcaagtccccatctttccgttcccatttgtggtccagttattacccaaaattcatcatcatttaattctaattgagcccttaaatatttttttagcacctcttttattacttgaactttgggatcatcatccttaaatatatttagttcgtaacttcgatagccagtaatccataatctcttcataaaattctccctaaagcctttaacttaaacttgtaatcatcttgtatcaatcattatgtaacgagtctggtataataaatctctagttaggagagtgatcactgtgaccattcactatcccaatggtcagcaacctgtacaacactataatacacataatgaattaccgacaccacatcaatctatttatgccaaacgtgggatgtcattagaggatgagatcaatcatagtaatcattactatttggctcaccatattgctgttattcataaaaagcctacccctattcagcttgtaaaagttgattaccccaagcggagtgcggctgttattaaagaagcatattttcggcgaccatcaactactgattacaatggagtgtaccgtggatactacattgattttgatgctaaagaaacacgtaataaaaattcttttccattaaagaactttcatccccaccaaattcaacatatgcgtgaatgtgtagcacagggaggaatttgttttgctttcattaaatttacggagcttgacctgctatacctgcttcccgcttccaacctgtttaaatattgggaccaacagcaaaatggcggccgtaaatcaattttgcgaactgatatcgctaaagaaggctatcaaattcattatcaactcaatccgcgtttaccatatttaaacgctgttgataaaataattgctgcaaaagcgtaaaggagtttactatgtcaaatgataatcagtcaacgcgtagtgagcgtcataataataataatgacaatcaacagcgcaatgttggcagcttaataaagaaaatcttgctatgggtagcaggaatcgtcgttctactaatggtggcatctgcagctttatttttctactatgcctcaagcgcgcctaaaattagtagaagcgacttaacaagtcagagtattacgactatttacgatgatcaaaatcgagtaatttctcgtttaggagcacaaaagcgagaatatgccaaggataatcaaattccaaagcagttaaaaaatgctgttgtttcaattgaggatcgccgcttctacaagcaccatggtgttgatacaattcgaattcttggagcagccacttctaatgtttttggtcgttcagccgggatgcaggggggaagtacgctgactcaacagttagttaaattatccgtcttctcaacggctgcctctgatcgaacattaaaacgtaaagcccaagaagcatggcttgctattaatgttgagcagcattttagcaagagtcaaatccttgatttctacattaacaaggtttacatgggaaatggaatttatggaatgcaaacagcagcccagtactactacggtaaagatttaaacgatcttgacctttcccaattagccctgcttgctgggatgccacaatctcccacttactataatccacttgtaagtaacacaaagtatgcaacgcaacggcgcaatgaagtattgaatgcgatggttcgcagcaattatattacccaatcccaggctaaccaagctgcaagcgacagcgttactgctggtttagaccctgatcacggtaatatttcgggaagcggaactgctgtagattctaaggttgtggatccttatgtaaagcaggttcttgctgatttacaggcacaaggatacgacccttatagtgatgggttaaaggttcacaccaatcttgacctcgatgcgcaacaacacctttatgatgctgcaaataaaaatgttcagttccaaaacgataaaatgcaagctggagtggctgttaccgacccccacaacgggcaaattattgccatgctcggtggccgtcacacaggaaatgttgtgtatggacttaaccgagctgtgcaaagcaatcgtagttctgggtcaaccgcaaagccattaatggattatggtccggctatcgaatacttgcaatggccaacttttaaatcaattgctgatacgcggtttgtctttcctggtaccaacactgtccttcatgactttgacaaaaagtacaagggtaatatgacaatgcgtgaagccttagttcaatcacggaatgttcctgctattcgcgcattgcaagctgttggaattaagcgtgctacttctttccttgatggattaggaatttcacaaaaacaaccatatactttacaaaacgggattgcgctgtatatctccccactccaagtttctgctgcatatgcggcctttgctaatggtggtacttactacaaaccttactacattagctcgattactactcaagatggttcagtaaagcaattcaatcctaaaggtaaacgcgcaatgaataaggctactgcctacatgattactgatatgcttaaaggagttttcacagattcacaaggaagcgcaactgacgctcgactcgacggtgttaaccaagctggtaagacagggacgacaaactaccctggaaattctagccagtctggcgtaatggattcctggatggctggttatactaagaattactcaattgcagtttggactggttatgaccacccactcgaacctggtggcagcatttcagaacagtatgtaaagtcagcgcaattgctttacaaggacttaatgcaatatcttgacagccaaaatcacgcatctgattggacgatgccagacactgttgaggctgttcgagttaaaggtaaacgtcagcttgtaattcgtgattcaaaatgggcatttgattacactgaagatacatcggatgatcgtgatagtagttctacttctagctcaagcgattcatcatcgtcttcatcttcttctagctctgcttcaagtagtagcagcgaaagtcgcacagaagaacgcaacaatactccagctgagtcttcatcaagcagtgctccggctagttcaagttcatctgcacccgcacaaagttcaagttctagccctgcctctgctacacaaccaagcacaactaatccctaataagatcttttaaaaattgaagataataaaaaggattgtggaattttctccgcaatcctttttattatcaactttttttaataatgaattgtacgttttcgccgaccattttgtagaatatagacggcaataattactaaaataattcctaaaatttctgcccaattcaagttcaatttaaagaagatcacacttaaaatcgaagttgtaattggttgaacagcatccatgatactaactacatcagatggggcatatctagttgcatgaagcaaaattccaaatggtaaaatcgttccgaataacaccaccgtcgcaaccgatgctactaacgtggtagtaatatgtggtggattgacccaaaatggccggtagaggttaaataggactccggcaatcatcgtcccccacccgaggacaacaattggcggattttcatcagcagcacgttgtggaaggacaacatagaatgcagctgtaattccagaacctaagccccagagaagagatacaaacggtaaagctaattgggtaaggttaccacgcgtaatacataatgctaccccaatcaaagcaacaacaaacgcaataatatcactcctgaacggacgacgatgcataaaaataattccacctaacacaataaaaagcggggaaagatattgaagaattgttgctgctgaggcatttcctgtttgaatagcataatagaacgtaagcaggtttgccatcaatcctaaaatagcataactaataactgaaatagcagttgctcgtgtcttaaatacgttaaaaatcttttttccatataaaaatacactaattactaataaaattactcctgctgaaaaagtccgcattgagagcatccacgtagcaggaattgctaaattttgtgagatgagttgcaaaacggttccggatattccccacatagcggaggcaaccgctgcccatataattcctttcattacttgagaagaagatttttccatgtcaaccaccctttatttaattttattcgcctaatttataaatcggtattttaggcttttttaatgtcttcttttctggcttttgtccagcctcttttcgctgttcaaacctcttttcgtgctcattgatatctctttctgtccgtaagccctgacgatcccagctttgtagaatccggtccatatattggagatttagcgcactattcattactgcctgccgtaaagcaagtttaatcattattgccgaataattatctttatccaaccaatcattaacaatttgcaattccattgatgagagtggccggccaaattcggcctctagctgattaaatgtctcaacccgactattagtattttcaaccttaattgtttcctcttggtcattctcattgagcaatgctaatttattgataaggagcgaaaaatcatatattgcatcttctttaccatcttccatttttcgcatcttctgctcaacaagatggtttgtcatcatttggtgaagctgttcaaacacctgccgctcttttgttcctaagttctttgcaattgtacgaacatccggattcattattcctcggtcctgataggatttgaactgaagatataagacaaattgagaagttgtcatccccaactctttataatgatgtagcaataagttgcttatatttgtttctcctgcctgcaaataatgttgtaaaaggcttgcatctggcatttaatcagctcctctcttagtaaaatatttttgcaaaagtaaagagactgagtaatcccagcctctattagtttcagcttttattaaaggttattaatattttgaacgtattgtccagtcttaaaattaatcagatcgtagcagaggttccctttttgattacgatatgttacttcccagacaatcttgtcattaaatatcccgggagcaacttttaaaatttctcgcagatcacgatttgattttgtcatcgctcgtgctctcgcagcagtaatcccacttgattgttttagaactctgatcttgccaccgtgttggggaaccataaccaagatcggttggttttgctgattcttgccactaatcgtatagtaagtattctctcgattataaatataaaattggtcaggagattgaagatgagcatatttttcagcaagtgaaattgtctgtcgtcgcgctgaatttcgcggctgattgctaactgcaaaaacactccacactattaacaagattagtaaaatcgcaatcaaaaggttacgaattgtccgcattgaggaaccgcgactttgttcacgctgaacttcacgtcgactttgcatatcttttccctcttatctctttagttttttagattcttatatgacaatcgttttcgattataccagaaatcggtaattaaaagttgataaagtttaattaactttgtcctctttaccatttcgtaaaaacttctgagtaattgaaatcaagtcagcagtttttttgctattaaccggtaaatcagtgggcagactactcaaaatcgtcttcccataccgtcttgtctgtagtcgtggatcaagaactactgcaaccccatgatcatcttctgtccgtaataatcgtccaatcccctgacgtaaccgcatcgttgcttttggcaattctgaatgatagaacggatttttcccctgctgctgaagtaacttattatgagcacgattcattatttcatcaggcgaatcgaacggtaagcgcgtaataattaagagttcaagagcggactctggtaaatctatcccttcccaaaaactagaagcaccaagaaggatcgaattttttccaccactaaactgttttaagattttatcacgattacccgtaattccttgggctaaaatatcccgctgatcaaatagatccgtttcacgaagttggctatatacctgctcaatcatcaccagtgagttgaataaaatcattgtctgataatcagcattcttcgttaattggtaaatcgtgtcactgagatatttaatgtaatcactgttattttgagcgctcggtactggtgcatcttctgcaatcaataatttagcattctgtttgtaattgtatggagatgcgaatcgacgcgttaaagtattattgcgctctaaatctaactggtggtaaagatacggcgatcgtggcgatgtaaacaatgtcgcccccacaaataatggttgagcaaaatatggataaacattctttgtgaggtaatgggttgcttccaatagccccccactaagctgtaaggcactttgttcacttgattggcgaatagtaatccaaaaagcagcagcctctccttgttgttgaagtgtttcgttaaattcatttagtgtctgatcggcttcaattaattttgcaagctgactttgaaattggctcatgaggtaacgatcacttaataaccaccggtctggctgactgctaaataaatgactgagggcagaaaaatgaagctgcacactgcttaatgcctgctctagcttcatcatcacgggcccactaatatctaaaagagccatcacttgatcattttgtagtggttgttcaattaattcattatcaggattaccagtagcgcttgccatatattgacggtaaagggcttgctggaaaaggtcaaccgcttcttctactgcattgagatcaccacgaagcaattcaacattataactgcctagtgcctgttcagcgaaaatatcagttaagttccggtcattgccattattaactaatccagacattatatgaactgctgtgcgcaatttttgaaaattaaatgttcgccgtgaccgttttaagatactttcgcttaagtgctgagcttcatcgattactaagtatgggcgacgagttccatcccctaattcctgggcatgagcaaccaagtacgcatgattcgtaataataatatcagcttgatgaagccgcttttcccgccgaacgagaaaatcatcatggtaaaaggcatttgctggattcaagctccgaataccctgatgacgaatttcagtaaagtatggcgactgctgagaatttaaattaagttcatcaaggtccccactttgcgttgaaagcagccatactaaaattttagcttttaacaactgaacaagcttcgattcttcaatcacacttaaggaatgaacaaaacgtgcaatatcaatataatgagcgtttcctttgataatcacactattcattttaaaaggcaacaccttatttaactgtgcgattgatgtatcaataatttgttgctggaggatattagttgctgtgctgacgacaatcttcttatcaagatatgcaacataacttagcggaaaaagatagcccaatgtcttccctactccagttccagcctcgacaatcatattttggggttcagcatgagtataattattgtaaatgctgttcatcattttggcttgaacaggccgcaatctcaacgtatctccgtatagcttttcctttgcctttttagtggaaggatatttatgcttttctcgctgaccattagcagtaatcggccgcgatttatgaagaacaattccgtgagagacatacaactcttcgcttaatggctggggcgatttacgtcgacgctgcaattcagcatcaaaaaccccggctgtttgctgaggtaggttgagcttcaactgagtaatcttttcaagcataagcgttggtaattcttgaactcgttttaacaagtcattaagtaagtctgcagttgcctcagcgtctgatactgcactatgagggtgatcatgctcaatatgcaacgaactagttaagtctcgtaaacggaaactctttgcagtaggaagaagaatctgactaagggttacagtatcgattgcaggaattgataatgagggatatccagctcgctctaattctgcatttaggaaaggaaagtcaaaattaacattgtgagccacaaaggtcgtttccgccaacaaactataaatagttccagcaatgtcctcaaacaaaggtgcttttcgtacgtctttatcttcaattcctgttaattgaacaattgaacgaggaattttctctcgtggatttatttttgtttcaaagtgattcatgatttcgccatcttgaacgagaacacaaccgatttgaatgattcgatcaccatgattaacattcgttccggttgtttctaaatcaacaactgagtagattggcgctttcttgtcacgcttttttgtgcgctgactactacgctgtgtcacactatcaccatatttctccgaagttattatattaagttactaaatattctaaactaaatgatacaccattctactataaatttctcatttttacacgaatcggcttttctttgtgctaaaatgtttagatttggtaacatccacaatcgcttttagctagaatcactgttttatgctatgattaagtttgaatttttatatagaaagtaggttacgatggtgaaacaacaagggattggtactagccatgcgaaaatcattttaatgggagaacatagcgtagtatacggtcaaccggcaatagccttaccattgccaagcgttcaattatcagttacgctcagcagtcgccaagataaccagcgaattattaaaagccgttattatcatggtagtctaggaaatttaccttcctccatgatcggaattaaaaaattaattgacactttatctgcaaggtttaatgaccacgaaactggttgggacttaaaaattgaaagtcaattacctgctgaacgaggaatggggtcgtctgccgccagtgcgattgcaattattcgagcattctttgattattatgatgaaccactcgatcgaacattattgcttcagcttgcagatgtcgaagaacaaattacacatcgtagtccatccggtttagacgctgctactgtcagttcagataaaccgcttttttatgttaaggggcggattggggtaccaattgaaatgaaccttgatgcctctttagtaattgctgatactggaaaaaaaggtgctactaaggaagctattttggcagttaaagatgaactgaaaaataacaatgaaaaagctgaaggacatattaagcatctcggtgaattagtaaaccaaacaaaagactatcttacacaaaatgacattgtaaaattaggcgatgctcttaactttgcgcaaactgatttagctgctctcaacgtgtcagaccatcattagatcaccttattcatgttgcacgtgataatggagctcttggtgcaaaattaactggtggtggtcgtggcggttgtatgatcgccttaatgcaaacagctatgggagctcgccgccttgcaagtatcctaaaagagaacggggcacatgatatttggcttcaaccacttgataagcgaggtaataactaatggcaactgcaaaagcacatactaatattgcgcttgttaaatattggggaaagaagaatcaagaattaatcattccacaaactgacagtctctcccttacgcttaatgagttttacaccactactaccgtaaattttgataatcaccttacttcagacttagttgccatcgatcaacaaacacttagtaagaaaggggccaaaaaagtagttcatgttctagatattgttcggcaactaagtggaataaaagcttttgcacgcgtaaagtcaattaatcatgttccaactgcagccggccttgcttcctcagcttccgcatttgctgccttagcaggcgctgctagtactgcggccggattaaatctctcaagccgtgatctatcacgacttgcccgacgtggatccggttcggcaactagatctatttatggcggattggttgaatggcaaaaaggaactgatgatgcatcctcgtttgcacaaccagttttagaaaatgttgactttccaatcgaaatgttagcagttttagttgatacaaaaaggaaaaaaatttccagtcgatctggaatgcaatccagtgttgaaacttcaccctactatgatgcttggcgccaagtagtagcgaatgatatggttgccataaagaaagctatcaaagcaaaagatattgaccaaatcggccatattgctgaagaaaatgctcttcggatgcacgcacttactttttcagctgaccctggttttacctactttaatggtgaaacgttaaccatcattaaagcagtggaagacttgcgcaatcagggaataaactgctattatacaatggatgccggtccgaacgtcaaagtgatttacgaccgagaaaaccggagcaaaattgttgaaaaattaagtaatattgttggcccagaacggttggtggtttcacaaccgggacctggaataaagatttggaatgaataaaatttaatgataaggggactttaaattttgattactgaaaaagctcccggtaaattgtatattgccggcgaatatgctgttgttgaaaatggttatcctgcagttttagttgcgttagatcaatttgttacctgtacaatcgaggaaagcactcaagaagttggtcaaattattagtcgccaatataataacgatcaattatcctggcgacgtttaggagaccaaatggtagttgacaaacgtgataatcctttttcttacattctttctgctattagagttacagaagaatatgctcgtacttttagtcgcgacttacgaatatttaatatccatattgacagtcaattagacagtgctaatggtcgaaaatatggtcttggttcctctgccgctgttactgtagcaactgttaaggctctttgtcggttctataatttgcccgttaacaaggaccaaatctttaaattagctgcaattgcccattttgaagttcaaggaaatggttcgttgggtgatgttgccgcttccgtatatggtggttggatttcctatcattcattcgatcggcagtggcttgcccaacaacgtaagtatcttgacctaaagacgatcattgatttaccttggcctgatctgaatattgagtctctaactgctcccaaaaacttagaacttttaattggctggactggtaaaccagcctcaacttcccaacttgttgataaaatttctctttttaaagctcgtcgtcaaactgaatatcatcattttcttgaaaaaagtaaatcatgtatccaacgaatggttgatggttttcaccgtcaagatcttgaagcgattaaaaatgaaattcgttataaccgtgacctcttaaaacaactcggcactaattcgggggtaaacatcgaaaccgaatcattatctaagctttgccaaatcgctgaatcttttggtggggctgctaagacatctggtgctggtggcggtgattgtgggatcgtcgctattgatagcaactctaactttgggaacgttctaaagagctgggccaaaaaccgcatcgaacaacttcctttatccgtacactttatcgataacgcaaaaagcttcaagaaatctgttaagcaccatctttcttacattcacaagtagatcaaaggaggctccatgatggaatcacgtcatgcccaacgaaaaaacgaacacctttcattagctgccaaatattatgaccaggttcatcaacatcattattttgatcaagtgcgtctaattcatgatagcttacctgaaatgacaacagatgatgttgatttgcatgtccagttagctgataatttagaaattgaatgtcctttttatattgaggcaatgactggcggaagtgatcaagcacttaaagtcaaccaacaacttgctcaattagctcataaacaccatttagcaatggcaactggatctctcagtattatttcaaaagacccccaatccttttcgtcttttgaaataattcgcgaagaaaatccaaagggcattatttttgcaaatttaagtgcaaatgccagtcttgaccaagcgataaatgctatttcacttttgaaggcaaatgcccttgaactgcatatcaatgcggcccaagaattaattatgcctgaaggtgatcgcgattttaattggttggataacatccaataccttgtcagtgaactagaagtcccagttattgtaaaagaggttggctttggaatgagcaaaacgacgattgccaaactgcaaacccatgacgttcacctcatcaatgttagtggtcgtggtgggacaaactttgcagcgattgagaatcggcgtaaccatgatattaattttgagagtttattggactggggacaaacaactcccgaatcactattggaagctcattcaattcggcgcggtaaaactgaaattattgcctctggcggaattacttctcccctcgatgttatcaaggccggtgtattaggcgcccgggcagttggtgttgccggttacttcctcaatattcttcaaaatgaaggctatgaagcattagaccaaacgctcggtgaatggcaagtgattgtcaaacgcttgctcgcgctccttggttgctcatcatttaccgagctttcacgtgttgaatatgttttaggaacagacttactatcatatgctcgtcaacgacacttacgctaacctaaataattgaaattcctattaagattgatacaattgatttaataactaaaggtttggatggtgattgaagtgaataaaattaattggggcaaatcaattacagttggtataacggctggtcttgttgccggccttgttaaacttggttgggaaaatattctcccaccacggacaccagagcgagatcaaacaaacccaccacaaaaaatgcttgagcaatttggcgttccaacacagattacacatgctacttatacctattccggccaacagttgccatgggtaagctatgttgttcactttagtttctcagctggttttggagttctctatagtatcggtggacagttagcgccgtggatcaaaaaaggcgatggaataccattcgggattgctgtttgggatttcttccacctcaagttaatgccattaatgggaacagtgcctgctgcaaaagatcaaccacttgaagaacatgtttctgaatttttaggacatgcaatctggatgtggacgattgatgcattaataaaaagtaaaaaataataaaagaggctgggaaaaaactcctagtccaaaatcgagtaggagataattgattagttcaattatcgacctctcacaccaccgtacgtacggttccgtatacggcggttcgacaacttaatcacattgaattgactggagcgtcttggacatattcataagtccgagttgttccagttttctattagttagagaatagctcaaggtcttactgtgtgcagttcgccagtagcccttgcgggtactagcgaagacatatgcatcacgctgggacagccccagcttctgtaagttagttaccttagttttaagcttcttccattgcttccagatatactgtcttattcgggccctcaaccacttgtcaaggcgttgaataaagtcagttagtttcccaattgagtagtactgaagccatccacgcatttttcgatgaatttcttcaaacattcttgtcagggatattccacgattacgtttagttaataacctcaatgctttctttactcgttgttgcgattgttttgctggacgggcgtaggctccattgtggtctacacccaacgaaaagccaagaaactttaaccgtagcgggctaccgactttggttttatctgggttcactttaactttcaatcgcttttcaagaaactgggtaatgcttcgcattactcgttctccggctcgttgacttttaacataaatgttacaatcatccgcatagcgcacaaagtggtgaccacgtctagtcaactctttatccaactcatttagatagatattcgccagtattggtgacaatggccctccttgtggggttcctttttcactcttagcgaaaagcccatggtctaagactccgctagttagaaacttacgaatgagccttagtgtccatgggtcatcaatatattgttgaagatacttaatcatcaagtcatgattaacattatcaaaataggcttttaggtctaagtcgacaactcttcgataaccttgattataaagatctactacttttgcaatagcgtcgtgagccccacggtgagggcggaagccaaaactattatcagagaaaacacgctcaaagataggtgtaagaatttgggccacagcttgttgaaccattcggtccaccactgttggtattccgagttttcttactccaccattaggcttcggaatttctacccgtttgactggtgctggtttatacttgccctcacgcaaactagcgatcaattccgtcttattttctctgagatatggcagaaggtcattgactgtcatatcgtcaatgcctgctgcccctttatttctcttaactcgcaaataagcctgattaaggttattgcggtccaagactaagtcttggatagtgacactcatacctttaccttcaccataatcggtactacgcgcccttgtgtactttcggttttccaaacctatcctcgacaagcggtcagcttgttgttctgttttctgcgattgtcgcacctgattacacctccgatataagttacaagttattgtcgttcagtccttcatctgattactcagactactatgacctcggctgacttctggcttactcaacgctacatcactgcaccgcttgtttctgtggaaattaaacttattcctcttgtcggaaacgtgtaggccagatctccccgggtaaggatattaactttcgtaccatgtcaccggtagctttactgaaagtaacttcgagtagtgttggactttaacttgtcatgcagtcttatccagttagttccagccttatagctacttcttgttcatcggtgcagtactttgccttagacttccttcagattccacctcgcagtggacacccttgtcctcagctcatggttccgactactacggcccatagcggactctcaccgcctagctaatacccatgccgggcgcacataaaaaccggatgatgaattttttgaacaattcatcatccggtttttatgtacacaggaaatcgttcctgatatgatgtaattacccctaaaaacaaccaaagggagcgatttccatgtatcaaaattataccataggacaaaccgaattcgtactaaactataactatgatttaccacaaaatcatattgcgcggctaattagtgattttgtcgactcgattccacaaaatgtgctattagaagattcaggagcggctaccggccgcccttcatcgcatccagcaattatgcttaagattctcttgtttgcctactcacgtcaaacttattctggaagaaagattgaaatgatgttggataagaacctgccaatgcgttggttagcccatgattatacttatagctaccataccatcaataactttcgacgcagtcagcacgctagtaagctaattaaacatgcctttgtctactttaccatggctttgaaagatcacggactaattcaaaatgatgcagtttttatcgatgggaccaaggtagaagccgatgccaataaatattcatttacttggcggcgggcggttgaaaagtatcacgctaagttaagagaaaagacgagtaagctttatggggaactagtagaaaaacaagtggtgcaagaaatggcacccgagctggttacttctgccgaaggcatggaagtaatgaaacaagagcttgcggagaaaatcattaagttagatgaagagattaagcaagaaccaaaaatcatcaaaggtggttcagttagaaaacggcgccgtcgttttctaaaaaacttcgccatcaattaagcaacgacctaattccgcgtgccaaaaagtatgaacgtaccgaagatatcttccaaggtcgtaatagctatttcaagactgatcatgatgcgacttttatgtgtatgaaggaagatccgatgatgaatcgggagttgaagcccggctataacctgcaaatcgctacacataagcaatttgtccttgattacgggctcttttcaaatccaactgacaccaggaccttagtgccatttcttacccagtttcatgctttagatttctttaagcatatcgttgccgatgccggttatggtagtgagtacaattacacaatgattcttgatcagtttgaaaagcagcctgttattccatacacaacttatcaaaaggaacagaaacataaatttaaaaacgatccaactaaatcacaaaattggcagtataatgccgaagatgattactacatcgatcatttaggagttcgctttagcttttatcgttatagtaggcgaaccgataaatatggtttcgaacgtgatttcaaactctatcgagcggataagcaccaactgtcagaacaattggatgagttggcaaaaacaccaagtggtcggcaacactatatgcaggttaacccaacgtggaattattacaaggctaaagtaaaagcaaccctctcaagtgacgaaggcaagacaatttatcgtcgacagaagttcgacgttgagccagtctttgatcacatgaagagggattttggcatatgccgaactcatctacgcggacaacgagctgtggaaaatgacattgggctagccctggtggcattaaatctaacgaaattgggacaatcaattagtcgattggcgactaatttcataaataatttaaaatccgaactacgatttttggatcgatcaaaaatcatagtccggattttactgttagagaaccaagaattaatagttaattcccagcctcttttattattttaaattatttacctttaaagtaatgcacttcggaagtgaagtcccccgtacgagtcgggtcacggaacaaaccgacattcatcaattcatctccaccataagtcttatcagtcatttcatcatgataatcaattgttggatcaagccctgccatcttggtattattaatttcaaaacggttagtatgcaactgcttaaacataaatagcagtgcttctgacttatccggactgataaattcccaggcgactgtattgctatcaaaaggactttctaagcgaataaagtcaccatattgaattaagtggcggtgagccttataaaacttgatctgttcctttaccatttgccgatcctcttcagtcaaatctgctaagtcaagttcatatccaaagaccccactcatggcaacatcgccccgcatctcaaaactggtagaacggccagtttgctggttaggtgaaaccgatacatgcgccgtcatagatgagattggataagttaaagatgttccgtattgaatctttaaccgttcaaccgcgtctgtatcatctgatggccaactttgcggcatgtagtaaagaataccagcatcaaagcggccaccaccgccagaacagccttcaaacaagatattaggataacgggtaactaaccgctccattaagtcatataaacctaaaacataacggtggctaacttctccttgatgttctgcatccgctgcgctagagaagacctcagtaagattacggttgaagtcccatttaatatagtcaagtggcaccttatctaaaattaagcacatttgattgtaaatattatcaacgacttctttacggctaaagtctagcactaattgattacgagaaagtgtcattccacggtttggttcatgtaaggcatagtctggatgttccttatataacttagagtcaactgaaatcatttctggctcaaaccagagaccaaatttcatgcaatgctcgtgggtccggtctgctacccgctttaatccaccagtaagcttatcctggttaacaaaccaatcaccaagcgatgaattatcatcattccggtggccaaaccagccgtcatcaagaacaaacatttcaattcccaatggctttgcttcatcaataatttggtctaacttcttatcatcaaagtcaaagaaggtcgcttcccagttattaataacaattggtcggtctgcatattgatacttaccgcgagcaacccggtctcgtaataacttatggaatacttgtgacatcccatttaagccacgctgactaaagcccatgattgcttcaggtgtctgaaaatcttttcccggttcaagaacccattcaaagttataatcattaattccagttattaagcgaatctggtcgatctgatctttttccaaggtaaactggtgattacctgagtagacaaggagcactcccaaagcatttccctgaaattcatcggtgttcttgtcaaccaaggccacaaacggattcatatgatgagaactagaatttcgacggctagaaaattctgttattccccgacgtaattcttgccgttcaggttgccgttcaagagcatattgtcctggaacggagataacgtcataatcatgtttagttaaatccagttgcattgaggcaatcttttcaattcgtaattcttgattgcttgtgtttactaaccgcgcattccgtgtaataaccggccgttcgttatagatggtgtatgaaagaataagttgtgcaccgattgttttatcaaccaaagtaacttccaatgtttctgcttctttatcacttttaacataagatgcaggtaatccagctagtttgggcttccccggtaaaatcttataagacttgtaacggaaatcagtcagtcgtgaaccattttttgttttgataataattgcaggcacacgatagtctccggtattgtttcccgaatactcctgcaacaaatcatctttagagtaagttcggtccatcgatccaggaaggttccctgaaaatccacgatcaactcgtggatatcggcgttcaccatggtagttacgaattgccggtccaaaataaaggtgactgaggatatttccctcttctattgaaaataaataggaaatttctttattttttaagtgaaaaacacgttgttgttcatcaaatgtaatcattcgttgtggcccctttcttgaaatcgattctataataaacgtttagttatttctcgtcaagcgctttcattattgatatgccagcaatcatccgtcaatattggctactaaacgtttactaaaaatatgttatgctagaaattgattaaaaggaggttttcctatgactggtatcagaaaaatagcacgtgaggctggtgtatctcctgccagcgtttcacgtgtcttaagcaatgattcatctttttcagtaggtgaacaaacaagagcacgaattaaaaaagtagcagcaaagtataattaccatccccacctaaacaggaccgttactccgccgccaactcctcgttcaattctagtgcttacaactcattcgctcgagacagaagctcatgacccttatttcattcaagtccatgatggaattattcaggaagcttccaagcaaaacattcaaatcaaagcttttgttcgttttcccaataaagcctttcaatttactgacgctcaaaaatatgatggcgtaattgttgccggagtttttacgcaagaattctacgctaatttagctaaaaacaatccccatatcgttttaattgacgactatcgatatctccccgcttacgatattatccgtaattcgtattttgaagccactcagatcgttcttgatcagttactagaaaatggacttaataaaatcgcctttatcggtggaaatattcatcccatgaataataatggcgaaacgacagactcgtatcaagatattcgagctaaggcctatttgatgtggacaagacttcataatatttctccattgattgtccttaatgggtggactcctaaagatggctttgacagcatgaatactcttttgaaagataattttcaggccgccttaatagctagtgaccaactaactatcggcgcatatcgagccctgaagcaacaccagcttaaagttccccaagaccttcaaattattagctataatgattcggatattgctgaatatttagttccgtccctttcatcgatcaatccagcgagtttttcaatggggacaatagcagttcaaagactagtccaccgtctgaataatccaaatgaaatccctattcatattaatttgcctgccaaagccacttggcgcgaaagttcagaaattaatttgaattagtgaaacgttttataagtaaaaagagagtaattgtgcttgtgataccgttttctaaggtttatactcaaacatggttatcagattgataaacgttcactttaattaaatgaggtttttgattatgttattaggaagtattgaagctggcggtactaagtttgtctgtgctgtcggtgacgaaaattttaatgaaattgataaaaaaatcatccctacaaccacccccgaagaaactttaggggcttcaattgaattttttaagcagtaccctgaactagctgcactttcaattgccagttttggaccaattgatactaatccggctagtgaaaagtacggttatattactgatactcctaaagttaagtggcaaaattgcaattttgtcggcacaatgactgaagccctcaatattcccgtctactggacaacggacgtcaatggttcggtttacggtgaatatgtcaatttaaaagataagtatgataatccggccttggtttactatacccttggaactggcgtgggtgctggagcaattcaaaatggccgctttattggtggaattagtacccctgaaatgggccatgttcgcttacaacgccacccagctgatctaaactttactggtatctgcccttaccaccacgattgcttggaaggattggtagctggaccaactttcaaggcgcggctcggtattagcggcgaagatgttcctgataatcaccctgtttgggatatcatggcctattacgttgcacaagcggcagttcaggtaactgccattttgcggccacaaaaaattatcttcggtggaagtgtttcgcgcccagcctttcttgaacgggttcggaagcaatttgcaatgttatggaatgactatcttccagttggatcgctcgatgaatatattgtcaacccttctgttccaggaaatggctctgctactctcggtaattttgcattggctaaacacttaatcgaaacaaataaataaccatcatcggtcactataatgcaaaaatgactaagactgaggaaaatattgctcctcaatcttagtcatttttatttatttccaaagatagttcaatagacccgctttagtcattccattggctgtcgtttcacgcaaaactgatgctgaattaattaaagcctcttgttcacgcgaatctaatggtaattctactaccctttgaataccatctttatcaattacagccggtgtcccgaggtaaatatccttttctccatattcaccatctaaatatgcacttacgggtaatactgtactttggtcatacaaaattgcttttgttattcttgccaaagcagtcgctactccataatatgttgcgcctttccggccaataatctcataagccttattacgtacttgttcttctagttttaacaattcttgctttgttagcccattagctaaaacataatccattaaaggcgttccaccgattgtcccacaagaataagcagcaaattctgaatcaccgtactctgctaacatatcaacatgaacatctcggggatcaattgctaaccttttaccaagtgctactcttaagcgtgccgaatcaagagaggttcctgatccaattactttatgtgctggaaaaccagaaattttttgaacagcatatgtcaagatatcgactgggttggcagcaattaagaagattccattaaacccggtattaactacttcttgaacgatttccttcataatctttaagttacgttcaactaatttaagccgtatttcacctggcttttgcacagcacctgcacaaatagtaacaatatcagcgtctttacaatcttgatagctaccagccttaacctttactggggcagtaaatggcgttgtgtcttccaaatccagtgcatccccaacgcttcgctcattactcttatttataataactaattcctcagctaaaccttgctggatcacgctaaaagcataagcggaccccacaactccatcaccaattaaaacaaccttttgatgttcttctgtcgccatactcctttttctctccctaattaaaatttacataaaaagatgagcataaataggaaccaaaatgtccattgctaacgaaacgataacaactgccactgcggccattgctccctgaattgaccctagttgaaccgccttagcagatccaacagtgtgaccagcggatccaagaccaagaccagttccgaccttagaaattttctttagtctaaagaccttaatcaggaattcggcaaggcaatatatttaactaaatcccatcccgttggactgaatagcaagataaaaagcatctgaatactttccatcaaaatccccacaataaaaccatgccacggcgtcattaccttaaaataactttttcgatcatgatacaaaaaaccagaaagcgcaccaatcaaaactgagctgggcacataaaaccaaccttgcaggggtgcacttgaataatccgatggacccccgctactaatcctactaaactaccaacccatggcccaccaataattccagcaactgaaacagccaaaattcggacattgacaatcgagtcatttgttgaaatggccgtaagaataattttattatgcaactggttattcgcatcgatctctattccagtcatattagctataatagcaaaaatagaaaaaagaatcgttagctgaattttggcactaatggtttgattaaataacaggcggcgaaataggggtacactaaccagcaaaaacgctagaataataattaaaccaacacgctcagacattaaaattgttaaatatatcatttatccttgtgtccctgtatttattactggttgcgttccccgttcactaataattgctaccatgatattattgataatttgcaaacgttgctcatctgttaaatcaaggttggcttccttgcttaggcgttcaatcgcttcttcagtaattgaaacagccccctcaacgattatcttgcgcgctgataggattgctgatgactgttgtttttgcagcatggcgctcgctatttcagttgcgtaggctaagtgcgttaaccgtgtttcaataattttgacccccgcgacatttaaccgttcttgcagttcagcagttaaacgctctgacacttcggtgggatttccgcgaagagtaattgcatcttgatcttcaaaactatcatagggatattcactagcaacatgacgaaccgcagactcactttgaatttgaacaaattgctcataatcatcaaccgaaaagagtgcttttgcggtatcgacaactttgtagacaataacggccgcaatttcgactggattacctttcgaatcattgacctttaaaatttgactattaaaattgcagacacgaagagaaacagtctccttatttgtaaatggtaccgtcataaataagcccgcatcacgaatagtcccaatataattaccaaaaaaagttaaaactttagcttcatttggctgaataattgtcaatgatgtactaaaaagaatcacaattaagaataaaataattccaattgtcaggactaccggaaaattacgcgtaaagccaacaaacatcagccacaaactaattaaaccgataataatcgccccgagtaacccgaggtagccgttaacgtgaaaggctgttttttctttcatctcgataatcctcctaatttaaaaacgtaaccccttgggataaaagtttttgattgttttaccgaccaactttccaaaaccagcagtatgtttgtcgcatactagtaaataccaaccattcggaaggtcagcatcaatattaattacatccccatggacatattggtgccactgttctctgtttaggtcaatgacccgttttgcctcctgtggtaagctagcaagggcccatgccaacgctggttcaaatcgatttttcttaaaagtaccgaggtgaagtccaggccgaagtacatttagtccctcgatcttgtcctcttctaatggcaaatcatagagctggtcaccaaataaaatcaattggtgtggttgatagtctggaaaaacgcttgtagcaaactggttaaagagtttgatctgttctttgtccggtttaacaatcgattgctttttccgcttattcttctttttgcgcttttcattagttgactctggcttaccatttactaacttagcaatgaaatgtccttcccccttgagatggtgcgggaataatcggactgtctttttcaactcttcattgccatcagcccattctggacgaccatcatccatccccactgccttttcaatcgggacgagttttaaatccggataatcaccaagcaaccatgaaatagtttgttcatcctcttctggtgcaaaagtacaggtcgaatagactaatgttcctcctggctttagcattttcattgcggatgctaggatcttctgctgacggttagcacactcagcagggtattctggtgaccaatattcaattccggcaggctcttttctaaacattccttctcccgaacaaggcgcgtcaacaagaatccggtcaaaatattgaggaaattgtttttctaaatctgcgggactctcactagtaacaactgcattttttgctccccatcgttccaggttttcagccaaaattttcgcccgtttagggaaaatttcattagcaactaatagtccctggttgttcattttagcgatgaggtgtgttgttttacctcccggagctgcacacaagtctagcactcgttctccagcttgtggattaaccacttctcctacaaacattgctgacggctcttgactatatacccatccagtaacatggtctaatgattttccattcacttgaccataatatcctgtcggcacatacggtacttttcccgtggctttttcaattgttgcaaccggctgtccgttctttaatggattctcgcgaaaaccactataacttgactgagcaagtgctgataaaaactcatcggcctctgctcccattagttttttgtatttcgtgacaaattcatttggtaattgcacgttatttttcgctcctctttactgtaatatctttattgtaacgtattttttagtctttttaagtcaaaatacttggcaaagcgttaagtttttgtttacaatattataattgaattttttatggaaagagaagtgagatagtaatggatcaacacttgattgcgcttgatcttgatggcacaacattaaataatcaatcgaaattaacaaacgagacaattataactttacgtgcccttgcccgggatggacatattgtcagcatcatcactggccgtccttaccgaattgccaaacatatttacgatgaaattgggattaaaactccgatggtaaactttaatggggccctaacgcatatacctcatgaacactgggataaagaatatgatgttgaattaacacgggagctagccctcgatcttctagcccaccggaaagaactaggaattaaaacaattaccgttgaaaataaacatcatgtatgggctaatcaagctagtaatgatttacccgaattcttaccgaacaagttgcgcgatgatcaaatcctaaccgcgactaacttaacaggcaatccaatcgcaatgacgatccaatatgaaccagaacaccaagaagaaatcattaaagcagttaatgaaaaatacggcgattttgttgaaccacgagtatggggtggcccttacaacatcttagaactgatccatcgtggcactcataaggagtcaggaatgttttatatcgctaagcagtaccaaattaaccggcaaaatattattgcttttggtgacgagcataatgatttagaaatgcttgatgcagctggacgtggcgttgcaatgcataatgccatttctgagcttaaaagtattgctaatgatgtgaccccaattgataacgagcataacgggctggcgaaatacttgcaagcttatttcaaagttacaatataaaaagctaggaagagatagtttaaaactaccaattcctagctttttacatagttattcctagtcaactagtttgccaacaacagggataccttcaaggactgattccagatggatagaacgaggcattactgaagttaaatcacgaccagcaaggtttccatggtgtttaccatccttccattgcggaacgttagagacatcgtaaacaacgcctttaacggcaacgtatgcaggatgtccatttcgaccatcgaactcagcgagttcggttgttgtaaatgttttttctgccatcaatgcttcacctttctctgattcaagaatagctaataattatattctagatcaaacaatccgtaaatgcattaattattagatgattattattttttcttcaatcaacttaataaaattgttaaaattggctttttgattgctcttcttgccttttccactcttttcataaaataatttatagataaaaagataatctttattacattaggacaaaaaattggtataataaaaggtgaaggtgattctgcaatcactttcgccaacatacttctactgtggatcattgatgttgtcatgtcatcaatgatcctcttttattttacagcattagttttattctgcaataaattttcacaattattccagccgtttattgaaactatttcagcaagtgtgaaaaataacttttggatcttgataattattagcaaaaagaagatactgaagaagagataactttaagaatgaaagcaggtttattgatgtatagagtacttgtggcggataattatcccatcattcgaatggcagttaaaaatctggttgaacaactagataattttaaagtaattgctgaagaaacaaccggaatagatgcctcattacgggttgaacaaggtgacattgatatcattattatggatttagcgataccacctggtgaaaatggtctgatcacaatcaaaagaattcatgaacatttccctaacaccaaaattattattttttcttctcgtaatgaacctcaatacatcaatcaggcaatttataatggcgcaaatagctatatctttaaaagctcctctccaaaagaactagttcatgccctaagacacgctattaatggtgaaaaatacttagacaataatattatggtaacgaagaaagatttattagttatcaaaggcggttctccgcacttcgatttaggaaattacgttgctctttcgaaacgtgagcaagaaatcttaccgttaatcgttctcggatatactaacaaagaaattgctactaagatgtttatatcccctaaaactgttgaagcccataagacaaagattatgcaaaaattaaaccttgcttcacacgcagaacttctccactatgcagttaaacatcaattagtagacctatagataatgggagtggaaaataatcttctcgacaaggcggtaggctaaggatagaacggtgattagcacggcacgggctgattatcgttcgtacttagcctcgagtcttatgattacgacgcggagctagcctatttggcttccacgttatcttactattgttcgcgaaaatcattgaggctgagagaaaacaaagttttctcccagcctcattattttcatttattactaattgtcttatcaaaattatttaaaagagcagctacttgaacttcaacaacattatttttattgaaccgcgcaaatacttctgcttcagttaaaagttgacgtatttttttcgagttttctcctaactcaattgtattatttgcttctagtaatttgattcgtggtaagaaataagtaacgtggttgctagcacagatctttgtcgtagcctccaacacttggttactaacttccaaccgcttgtttaatgaatgatactcggcagcgtagtacatcatcgttacaatccgtagataatagttccgatcaacacccgctaagtcttcatcagcctttgatcttaagaatgcaataacctttgagaaaaagaaatcagcatgttccattgaattttgtcgtgcatataagatccctgatcctaaatatgctaatggtgaaaagatcgtccgatgttgctcatccagttcatctaaaatcttagtaaagttaaaaagacttgtcgacgcgttattattagttaaagtgtaaatcatcccttttaaataataatattgcatccggtcttgtggcgattttaaatcttcaagccgaatcttcttaaggttactaactgcctgtggaaagtgttcaatcattaaagctaattcaatttggtctagcagactccggatataacgaattgaagacgtattatccttacttaaatcatcaatcgttaatcctagccgctcacaaagctgcgccaaaatcgtgagtgatggtacttgaccattgctttcaaacttgcttaaggtcgactgggtacaaatccccttgcttaaggcaacttgtgagtagccgagtctttttcgttgataaacaaagcgtttaatatccatgtctgacctcctatatctaaccgtgaattcctaatgcaattttagcaaacctactcattcttgacaaatcccagacaggttcccacacaaggttaatattacatttagttacaccttcaacagaagtaactgccttggtaatgtcgcgatttaagatgtcgcctaatggacagcccattgtcgttaaagtcattgtaaccgtacattcaccattattatcaactttaacatcataaataaggccaaggttaacgaggtcaattcccagttctgggtcaataacttcttccaacgcatccatcactttattttcaattggggaaaagggagtatccttttcgtcagccataagcgttcctccaaacttatttgttaattcaattaaccaattgaaccttccatctcaaaactgatcaaacggttcaattcaactgcatattccatcggtaattgtttcgtaaatggttccacaaagcccataataatcatttcagttgcctttgcttctgaaattcccctgctcataaggtagtaaagctgttcttcagagatcttagatacttttgcctcatgttccattgcgacatgagcattgtcaatttcattatatgggatcgtatctgaggatgattggtcatccataatgatcgtatcacattcaacgtgggctttagagccatcagagtgcttaccaaagcggaccgttccgcggtaatcagttgagccccccgtcttagcaatcgacttcgaaacaattgaactagatgtgtttttagcattgtggatcattcgggctcccgaatcttggtggattccgttgctggcaactgcgatggaaagcatggttccccgtgccccctcaccattaaggtagacgcttgggtacttcatcgtgacttttgagccaaggttcccatcgacccattccatggttgcgttttctgctgctgctgcccgttttgtttctagactataaacattatcagaccagttctgaatagttgtgtaacgacaataagcatccttgcagacgttaacttcaacaacggcagcatggagactatcagaagagtaattgggagcagtacatccttcaacataatcaacacttgccccttcatcaacaataatcaaggttcgctcaaattgtcctgagttttccgcattaagccggaagtaagattgaattggcgtctttgtcttaacgcccattggtacataaataaatgaaccgcccgaccatactgctgcatttagggctgcaaatttattatcagttggttgaactaatttaccaaaccatttcttaaataattctggatattcttttaaggctgtatctgtatcagtaaaaataatccccagcttttcaaactcatttttcatgttgtgataaacaacttcagattcatactgagctgaagaaccagcaaggtattttcgctctgcttccggaactcctaagcgatcaaaagtccgttttaaatcttcgggcacatcatcccagtcgcgaaactttttatccgtcatcttttggtagtaaagcatgttcttcaggtctaattctgataaatctggaccaaattttggcatcggtaattctttataaatcttgtaggctttaagccggtaatctagcatccatttaggttcatgcttagcagctgaaattttgcggacagtttcttctgttaaccctctcccagttgagtattccggctcaacgttatcgtgaaagccgtattcgtactggtcattattatttataatgctagctgcatcattactcattattttcttcctcctcgctatccttcaacagtgctcgttgtaatgcccaccatgagagcgtggcacactttattcgggctggaaattccataatactagtaagaatccgggcatcccctagttgatccaagtcagcttctgaatgttctttgccaattgccatatcagaaaaagtctttgccatcgcaagggcttcttcagttgtttttcctttaacagcatcggtcatcatgcttgctgatgcttgactaatagtacagccatcaccagtataggcaatatttttgatcttgttatcttctacttcgacttgaagattaatcgtatctccacaagtcggattatgaagggtcattgcattcgtagtagttgctaattctcccttattatgtggatgatcggcatggtcgagaatcacttcacggtataaaccacttaacttagatagtcccaatgttaaagaactcctttgtttccttgattgcgttaattaattgatcagcatcttctttagtattgtaaaaataaaaactggcacgagcggttgctgttactcccaagtcttccatgagtggctgcgcacaatggtgaccagcacggactgctaccccatccatatcaagggccgtggcaacatcatggggatggagacctttgatgttaaaggaaattaccccagtatgttttgctggcgattgcggaccataaacttcgacatctggaatagcaattaacttgggtaaaacataattaacaagttcctgttctttttgcacaatcctatccattccaataccatttaaataatcaatcgcggctccaagcccaactgccccggcaatattttgggttcccgcttcaaatttaaacgggatatcagcccatgtactctcattccggtgaacgtcattaatcatttctccaccgtattggtaaggagacatcgctcgtaataagttctcttttccgtacaaaaccccaattcccattggactcatcatcttatgaccagagaaagcgtaaaagtcaacatcaagatcttgtacatcgactggcatatggggaactgcttgtgctccatcaccaacaacgattgccccatgttggtgcgcaatcgttgctaattctttcaagggcgtcactgttcctaatacattactagcatgagctactgccacaatctttgtcttatcggtaattttctttttagcatctgcaagatcaagttcgccatctggagttaattcaatatatttcagggtagcacccttttccttagctaattgttgccaaggaataaggttactatggtgttccattattgaaataacaatctcatcaccaggttgaatattttgttcgccataggttgcagcgacgagattcaacccatccgtacatccctttgtaaagataatctcattagcactcgacgcgttaataaacttttgcactttttttcgcgcttcttcataatccttagttgcacgttctgctagggtatgaacccctcgatgaacatttgcattatcttgttcataaaagttaataagtgcctgaattacctgacgtgggcgctgaacagtcgcagcattatcaaggtaggctaagcgttcatcattaactcgctgattaagtgctggaaagtcggctaaataatcattcgtattgttgtccatcggcgagcttcctttcaagaatcgtaattaacttatttcgtacatccactgctgggattgcactcaagactgctcctaggaatcctcgaataaccattcgttctgcttgtgcgcgcggaattccccgactcattaagtaatacatttgttgttgatcaactgggccaacactagccgcatgtcctgcctcaacatcattttcgtcaattaacagaattgggttagcatctcctcgtgcttgatcggacataatcaatacccggttttgttgatcagcctttgcaccatgagcaccatgaataatttgcccaattccattaaaaatcaattcagacttttcaagaataacacctcgctggtttatcaatccggtagtatgcttgccatgattagtaacgcggttgttgacgccaacttcttggtcacgagtagttacggcaatcatctttgagttagcataacccccatcacctagcaattcggaatccatatcaccaactgtggcaccatcgttcatcaagccgactgcccattcaacgtgcgcatccttgccaatatcggcacgccgcttaaagtaagtatgggtatggggaccaaattcatctaaggaagaaaaatcaatctcactattttcctgcgccattaattcaatcatcatattagcggcattttcatgatcaccaacagttgtaaggtgttggataaacttaatgcggctgccacgatcggcaattactagaatatgcgaaattagaggctcatcttgagtactgtcctgaataatctcagcctcaattggcttttcaatttcaacgttttttggaatatagaggaataaaccggcattaaggtaggcaagatgataagcagttaataggttttcttcggggttaatagcagtcatgaagtacttattgaaaagttcaggatattcgcgcgcagcagtaaagatatctgtgagaataaccccctgatcttgaagtttttgtggcaagttaacgtggagcaaagtttgcccaaactgagttaccttaattacttcatcatcggtgactggtttttcaactaagtcggcgtctgcttcaacccatttcaatggccgctccgcaataaggggccaagttcgaaaatcgaaccgttgcatccgtggcaaacgaagcttttccattaactcccgagcactaagccggcgatcaatcaattgctgaggttcattatttgctttactagcagcaattatttgttcttttgctgagtttaattctgtcatcaaactgcctcctagtcttcatcatctacaagtttgatatcaagacctaattcgtcacgtaagccagcgtaaccttcatcttcaagtttcttggcaagatcaggaccaccagttttaacaattcgaccacccatcattacgtgaactgtatcaggaacgatgtagttcaaaagacgttgatagtgggtaataattaatgaaccaaagttgtcgccccgcattgaattaacaccctttgaaaccaccttaagggcatcaatatcaagtccagagtcaatctcatcaagaatcgcaaaactaggttcaatcattaaaagctgcaaaatctcattccgcttcttttcaccaccagagaatccttcattaagataacgttcagtcatggattgactcatatcaagcaattccaggttcttatcgagtttcttaataaagtccattaccgaaatttgatcatcttcaggacgacgagcattgatcgcagcccgaagaaactcagcattagtaaccccttgaatttcagcgggatattgcattgcaagaaagagaccttttcgtgctcgttcatcgaccggcatatcaacaatactctccccatcaagaaggatatcgccttttgtaacatgatagttaggatgacccatgatggtttgagaaagagtagacttaccagttccatttggtcccataattgcatggatttctccagtcttcatcttaaggttaacccctttaaggatctccttttcttctttgctttcttcatctttaactgaaacgtgaagatcctttatttctagtgttgccataaaattcatcctcctgacccgaaatattccaaaatattctcggtaaatattccataaatatcaacaaattctttacattcttattatatccgaataataaaaaaataaaactattcatctcaatttattttaagcgttttctcgatgaataatttgagtgtataataaagatataatatagtgtttatataattttagaatatttgataaggcaggtggcgataatgattcaacaaaattatattcttcactcatttgactgtttaaatacagccactgccgcccgattacatgatatgggcttgtgtgaagggtgtccgattaaagtagttcaaaaatatccttttcatggcccagtgataatcgaaaatgatcaccaacgaattggtttgcggtacactgtttttacgatgcttacgggggcagaataaaatgacaacagttgcactgattggaaaccctaatactggtaaaactaccctgtttaactcgctcactgataaatacgcctatgtcggtaattggacaggagtcacagttgaaaagaaacaaggaacgcttaagggaacagatattattatcatcgatttacctggcgtatattcactcgatcctttgacaaaagacgaagcagtggtaactaactacttaatgcataaccaacctaatatggtcttaaatattacgaatgctagtcagttaaaacgaaaccttttgctaacaatcgaggtattggaactcggctatcctgttgtattggttcttaacatgattgatgatctccgtcgatcagggtacgactatgatcttgacctgcttgaaaaaaggctgggttgtaaagtaatgacaacaaatgcgcgtggacatcaagggattgatcaattacgaaaagaaactatcaattgtaattcgctccaccctacccaactagatttagattatccccgatgatcaagcaagcaatcaggcaggcaagtacagcgttggaaagtgattattcttttgcgccccaggttgcgcgttggttagcgattcaattcataagtaagaataaagtaattcgtaaatttgcccgggaaaaagagctaactccccttctttcgcaacaaaaatattatgacgcgcaaaagttcgctgaccaaatttttgaagtccggctacagtttattgaggacactctcaaccaggcccgtcatccacttaacaatggtgggcaagttgagataacaagtcgaatcgacaaaatcgttaccaacccgattcttggcttaccaattttcgtcctaattttctttgtaatgtttaagatgtcctttgattgggttggcaccccactttccgatatgcttgatcagtttatatcaggcccagtttcaactactaccgaccaaaccctcgctagtctaggggcaattcctgcattacggtcgttagtcgttaacggcattattgccggggttggtggagttttagcctttattccacaaatcttcatgctctttgcctgcatttccctgcttgaggactctggttatatggcgcgggcagcgttagtaacggaccgggttatgcagatgattggtttaaatggtaagtcttttattccattaattattggttttggttgtaacgttacgggaatcatggctgcgcgaacaattgaacagcctaaagaacgactgatcactaccttaatcatgccgtttatgagttgttcagcccgcctaccgatttatagcttattcgttgccgccttcttcccacgtcaccaagcactgattgttttatcagtctacttcttaggaattgtcgtggctttagcaatggcaaaattctatcaagtaatctttaaggtaaaagaaagctcagtgtttgtagttgaacttcctcactatcatcttccccgtcttgatataatttggcacggaacatgggataagggtaaaggatttattaaaaaggctgggacaattatttttgctggaactgttttaatctggatattatcaagttttggtcctagtggttttgttactaattcggctaatagttttgctgccgaccttggacacatccttgttccgatctttaagccaattggtattgaccagtggcagccaattagtgctttgtttacagggatccttgccaaagaggttattacttctagtatgatggtaatgttccatacaagcagtaaagcattcctcatcgcttcacttggtcagtttatgactccgctttctgcttatacgttattagtctttattctcttatatgcaccatgtttcgcaacgttagcaactatcaaacaagaaactggttctacaaagtggatgctttattctgttgcatccagtttagtcgttgcgtacgggcttgcatttattatctttcaggttggtcgattatttattgggtgatttaaaatgaaattaattattaacgttattattattgctgcaattattgcgttagccttttacctccttgttaagacttttcaacgaggcaagcaagggaaatgtgcagcttgtgactacgattgtgaaattaaaaagctggcaaagaataaaaagtaattataaaatatggagacgtgtggttagtttccacgttatcttgctattgttcgtgaaaacgaggctgagagaaaacaaaagttttctcccagcctcgtttttttactcattattcaatttttctcgtaacataaaccggcgaatcttaccactcgcgttttttggcaattctgaaacaaaaatatagtgttgaggaactttatatcgcgccagatgttcataaccataatttattagcttagttggagaaagacgacgatcactgacgacaaaggcaactggtacttggccccagacagaatcattttgaccaacgactgcaacttcattaatctgtgggtaacgttggtagatctgctcaacttcttggggaaaatattttctccaccagagatcaacatttcatctgcgcgaccatcgatatagagatatccttctttgtccaggtgaccgatatctcctgtccggtaccacccgtcaatcattttagaaggcaacttatcaggcaggttaagatagcccggagttaaagctggtgttttcagcagaatttcaccatctttactaagttttagttgggttgagaatagtggctgcccaactgatcctaattttaggagtgcatcagctgaccgtaatgcaacaatttgggaacatgtttccgtcattccatagcattgaacaacaggaattgaccgttgcaaacatgcttcgagcgtttctcgatcaatcgttccgcccccaagtaacatacaacgaaatgctgaattatagtgcgtattagtcttattttgctgctgaatgagctttttcagcataaaaggcacaaccgacataatggtgaccgtttcatttgctaaaattcgttcaagttcttcagcacggaacttctcaaccaagcgaacagtcatcccgtaaattaatccccgcataataatcgaaaaaccactaatatgaaagatcggcgctacacacaaccacttatctgcggatgataaacctaaattcaatgcagaagagactgctgaataaaaatggttgccaaaagtttgcaaaactcctttaggcctaccagtcgtcccagaagtatacataatgctggctacccagtttgatttaaatactggaattagctctcctggatcagcacttgttatcaagaacgcactgtaagacttaaaaggatccgtcatccctgatcgccagagagaattttcaaccaaacacaactgaagtccactatctttaatctgtcgttcaagctcttcaccagcaagccgcaagttcaaccagacaatcgtgcggccactacacatgatcgctagtgataatttatagctcatcagagtattagtagctaggatgcctacccgcgaaccaggattaagatggtcaatttttccaacaagtacctctacctgtttttttaattcagcaaatgataggcgttcattaccatcgtcaatcgcaatctggttcggctgagttgctgcttgctttaatagccagttttgtgtttccatttaaattgcctcttttatttatgggaatttagggaactggtcaaaattagggtcccgtttttcgttaaaggcatcccgcccttctttaccttcatcagtggtgtagaagagcatcgtcgcatcaccaccgagctgttggaggccagccagtccatcagtatcagcattcatggcagccttaataaaccgtaatgccgttggtgacttcttcaagatttcgttacaccagtccaaggtaaccgattcaacttggtctaatggcacaactttattaatccagttcatctggtaggcttcatcggcactatagaagtgatttaagaaccagacttcctttgcccgtttatgaccaattacgcgggcaagataaccagatccatagccagcatcaaaacttccgaccttaggaccagtttgaccaaatttagcattgtcagcagcaatcgttaaatcacaaacaagttgcaagatatttccgccaccaactgaccaaccttttaccatcgcaatgactggtttagggataatccggattaaatgctgcaaatcaaggacattgagacgggcaatcttatctggaccaacgtatccaccattaccacgaactccttggtcaccaccagatgagaaagccttatcaccagcaccagttaggataatcaccccaattgtgctatcatcacgacagatggtaaacgcgtcgatcatttcttgaattgtaacgggggtaaaggcgttcatcttttctggacgattcattgtaatttttgcaatctttcccgctcgttcaaaaataatttcagaataatctttaaccggttgccaatcaactgttgtcataactactctactccttttgtgaggtcaataataatgaacctattagaaaatttagatattcaaactcaatcagtcacagccaacaagtgcgttatcactgttaaagtaagtgataagctcaagcaaccttatggaatcgttcatggtggaataaattcagtcctcgctgaaaccgcagcttccttaggtgccaatcaatggttagctgatcgtcaacaagatcaaatagctctcggtgttaatattaccacagagcacctcattgcggtatcgaatggtaaattaagagcaattgcaattccgattaaacgtggccggcgaatccaaacctggcaagtcgatatccattgcaatgatcaatgtactagtaccagtatagttactttgatcaatcaaccccggtcttaatcttctgatcatttctttaattattattcgaaaataaaattatttagaattataaaaaatggttattcatctttactactatcttttctcgccttaacgttcgattaatcgttctgattatacaaattccgttattgttctaaaataagacatttgataaattaataccaacgcgaggcgaactgcgtgataaaattaaaccgttttatcttgcctgaattaaggaatgaatcccttcttttaggtcgtcagtttacctatttggggagaagaaaaataaataggacaaacactatgatgggaagcatgtcgcgtaaattatagttttaaaggagagcatttttgatatgcgcttcaatgaaaaagatgaagaaaagtaccttaagctgattaacaatacccgtcgcggaagcaataaagacttcgaagagttatttcgccgttattggccgctcgttcgccgactgtggcaacgatataatattagcggccttgaattggcagattgggaacaggaagcccgtgttgtgatgctagaagttattcgtttatacaataatcaaggtccgcgcatgtttagctgcttttttaaggaatgcttaactaaccggattcgtgatattcaacgacaaactcaggctcacaaacggatcccagcaggctgtctttacgcattaagcgatgattttgctgaaacacttaccgactttttacatcattcccctgatgacattatttattgccggcagagtcttgaccgtttactttgccgctgttctacatttgaacgaaaagtattagtttatctccatactggttattcgataactgagattgctggtacccttgattgctctaaacggagcgtccaaagtgccttgcatcgttgccacggcaagctattaaaagtattaatgaagtaaggacttataaagcaaaaataaggtgctgagagaaagctttttattttctcccaacaccttattttttatgctttcctaataaacaaacatgcaatcactgcaactaatgcactgataacaaggccgaagaaagcagctgaatatgagccggctgcttggacaatccacccaattaagagtggaccaacaaaaccaccgagttgcccaccaaagttaacaatcccaattgatgatccataagttttctccgataaaatctgtgcaatgaaactaaagataccggtaaatgccaatgatttaacgaaatagatcaagacatcaaagatcacaacgcctactaatgaagttgacttaaagagaccaaacatgaaaaccagagtcaggaatgaagcaatactaatcatcctccgttcatgcttcttaaacaaatgcaccatcacaaagccagaaataaatgctgcaatacctccagaaataactggcagtggtactaaccaggccaagttcttcaagttaattccctgttcttgcaagaaataaactggcatccaggtttcaagtcccttagtaatgatattcagcgcaagtccaattactacaaaggcccagacacggtggtcaatctttttccattcaatcttggaacgcgcctgcccattttcttggctgctattaattggccgttctaccaggtaataggtaagtaaaataataaacccaccaaccccaagcaaaacaaaggcatttcgccaaccactgctagcaataattggcacaataattagtggcgctactgctgccccggcataattcgatgaaattaaagcagaagttgcttgtgatttctcactcttatcataattttcagaaattcgttttaatgccgctgctggatatggcccttctgcaatcccaaacagaaaccgaatcgcaatcaaggcagcaagggaccacgcccagccagtcaccattgtcatcaacgaccaggcaaacaaggaaataattaccatcagtttactgccaaacttatcagttaagtatcctccaggtatctgcatcaaagtataccctaagaagaacgcactggcggttgcccctaacgctgccgccccaacatgaaagtctttaccgatgtaagcaagggaaatattcatcactgtgcggtcagcaaataaaatcatatatcctaaatatagtagcagaaaagatccccatcgttttgctactgtaaagttacctatattttccataaaattacccctttaatataaagatctttttattgtaattgatcattttagaacttaccacccaaatcctaagaatatccgctaaaattaagaacgtcactcttaatatttttttgttaaaatattagagatatcctaaaaaatgattgttaatccaaggaggaattatggatttctcatttaaaaaacgaccggtaaaaagactatatggtgaatatactattttattcatctttttagccttatgtattttcgggacatacttaattactggtcatacttttatccttagcaaagatgctctcaatcagcatttacctttactagcaaagtatcgagaagcactgattagcttcttccaccatcctcgcctaaacttctggtcatggcaaatggggctaggcagtgatacctttcaagtatattcttactatacgattggagacgttttctcttaccttgtactactttttcccgcagcaaagattaccctcgcctaccaggtaattaatattatccggatgtattgtgttggcctcgcttttgtctacttcgcgcaacactttaaatttcggaatagcgtcattttgatgggggcaacaacctacctggtcaattcgtttttactctatgcctgtatcgcccagccgttctttaccacgccatttattatctttcctttaatcgtggtccagattgaacggatattgcaagaaggctcgccctggccgcttgctggtgcctttacatggatgctagtaagcaactattaccttgcttacgttttaggaattggttcatttctctatcttgtccttcgcgtaggaacgcattatcgtcgcacgcttaattatgggaaagccttgcttaaacttgcctttgcgacaattactagtgtcctcttatccgcggtcttgctcgtcccagaaattatcgcggtcacaaattcaacccggactggatcattatttgctaatggtttaaaaacctatcctctttactactatctctttttgcctaagtcactgattaacggtggtcaatggtatttcatgttctggtctgcgctagggattgtttcaattggttttatcgcccttgtttacatttattctcgtccccgaaagtatcccctgctaacgattagccttggtctttccttaatcatgctgctaattccagcagtcggcgctttcttcaacggaatgatgtcagcttctaaccgttggacgctcttgatctaccttccattagcaatggccgtctgtattctagcagagaacattccaacgcttgatcaaaagacaatggcggtcctaagttgggcaacagggatttacctcattgtcttgattgcaaccttcttctttgacaatgagaatgatatttttatgccggttattttcttaattggctccctaatggtcatctggttgattcacttaaataaacttactcatccttaccggtggttactagcgattacaatgcttaacgctggggtgaacgcaatttacgcggctttcccctataacggagatttctctagtagtatgctgagccggggagagtatcaagcaattactagcaaccgttacggtaaccttgatcaggatttgaagaataattctttttaccgcgtttcaacaattagccaaaataagattattgacggcccgaaccttgataacgaccttacttctggattgcataacattgattcttactattcactgcaaaataaatatttgggacagtttaatacaagcctacaaaataaccagtatcaggctaatatccccattcggcaagccgatgatcggacaattatgaacaatttctttggcgtcaaatatctctttgttcaaagcaatggtgataacgcgacaaagattcccgctggttactttttagataaagcaactgatccagtcatcaattatgatgaaggacagccaagcaatcccaaaagcaaagatgagtttgtgcccacgcaaacaatgcggtacaaaacgaactatgctttcccattactttactggcaagataattacattagtaaaaaagattatcaatcactctcaccaactgaaaaagaacgcgttttagctaccggtgttctggttgataagcaagaaaagcttcgaggaatgaaggccgctaatctcaagacgcatgtctatccccttaaaagcgagttagtttctaaccgcttgaataaggttaacccggctaagctgacctataccgatagtgaagaaacttatcaattgcaattatcagaactgcaaagtaaaaaaatgcagcaaaaattaaagggcagcgagttgcatattgaattttctaagattaagtacactcctttctccatgaaagaacagattgcctatgagcaagcacatctgaaggaaacggtccttaatcccggaaatgttattaatcagcgctatacccactatcgctattggcgttaccacgttttaaatggttcacctgatattagctttaagcttaatgtcggcagtaagtttggaactgctacgattgaacaggcgcggcaaagtaccctttctttatttaaacacgttactaattcgacgcttaatattggttattatgatggcaaactgccaacttcactcaccttccagccttcaaagctgggaacttataagctcaaataccgggtagtagcagaaaaactagataataattattatcgtgaagttaaaacattgcaacgccatcgtctagaggacgttaaattcaaacgcaaccaagttcagggaacgattaaaactactcgtcctggcgtcctcacctcttcgattccttattctactggttggtcagtgaaagttaatgggaaaaagacaactaccttacgaacaaaccaggctttcctaggagtatacttacctgccggaactcatcatgttacctttagctatgagttgccaggaatcaaattaggcgtattactcagcttgattggcctaggctggaccattcttaccggaatcattacgatcgtatgggaacggaagcgcaagtaaagcagaataattcttgcatcccttttaagagacgcttaagataaaattaaatctatgggcaggagaaaaaatcgtgcataagaagtttacctatattgtctaccaaattattatggctatcttagccgttatctcgattggaatgctgatcgcatattatgctaagcggatcaatattgatgcctacccttacaatatgattgacaatgggatttggttggccttctttactgattacgttatccgcctgattatttcaccaaataaacgcgaatttgttaaagataacatctttgaccttctatcaatcattcctgccagcagcctcttctttctcttccgaattggacaaattggtagaacctttcagatgcttaaactcatgcgcattatgcgtttagtcggatttaccggtcgtttaggcgtcttctttgagcgcaatgagttgctctactacttgtacattacgattgctgttataatggtagccgctgcaatgttttgcatctcggagaaagtctcttacgaaacagccctgtggtgggcaattacaactgctactacgattggttacggggatgtgattcctaagaccggaattggccgggcagccgcgattgtcttgatgctcttgggaattggttttattgggatgcttaccagtacgattactgagttctttgccaaaaaagacgaacggaagatttctgcacaattagtcaaaattcaacatgaaaatcgccaactaaaggctgagctagacgaaatcaagcgtttgattaagaaaaataaacgttagcaaataacctccattcaaggatttatccaagaatggaggttatttttaatttatttgtcgatttaacgaaatcatctctagtaagctttgtgcagtgatcgctccttcattacccgctttgagtcccgcgcgttgcattgcctgttcaatgttatcggtagtaaggatgccaaatgtaattggaatattgctcgttaagttaagattcattacgccgccagcaacattttgacaaattaaatcgtagtgatctgtttcacctttgataatagcgcctaacgtcaaaatgccgtcatattccttttttgtcaataattgttttgtcataaacggaatttcaaatgctcccggcacatggtatacatcaacgttttcaaggtcaaacttagctaacatttcggtagctccctgcactaattgtttagtgacagtttcgttaaaatcagcaacaacaatcccgatttttgcactttgaacattaaattttccagtaaattctttcatgattaagcctccagattcagtaagtgatgaaatttatttttctttgtgattaagtaattctcatcgtagttattaggtgcgatttctaatggtatccgttcattgatttcaatatcgccaagttgtaattgcgcaattttatcgggattattagtaagtaggttaatcttggttatccctaattgatgtaaaatcgcaactgcttggtcatactgccgttcatcaggcgcaaaactaatttttcattggcttcgacatcatagtcgtgctcttgtaaagtaagctcgcaacttatttgctaaaccaattccacgaccttcttgacgcaaataaataataaccccgttgccgtttttctcaattcggcgcattgcttcatgaagttgaggaccacaatcacagcgaagggaaccaacatcgccagtaaagcattctgaatgcaagcgaaccattacaggagtagttggatcaatatctcccttattagcgctagattattgccatcaaaccacgtaagcgaaagtcaccatactgagacgggaggtgcacctctgctactggtttgctcgctagactttgccggtattcctgaagttctttgatcgtaatgatgggtaagctaaattcggctgctttctcatggagttcaactgatcgtgccatttcaccattgtcttttaaaatctcacagatataagcaactggttccaccccagctaagcgcgcaaggtcaacagcagcttcagtatgtccatttcgttctaatactccatttttctttgcaactaaaggaaagatatgacctggtttgtagaagtcttcgtttttagcagtcggtgcggcaagatgagtaatagtgcgccaacgatcaaaagctgaaattcccgttgttgtcgaatgatggtcaacgctgatcgtaaaagccgtaccaaaaggatctgaattatcagcagtcatctgaggtaatttcaatcgttcagctacttccggtgccatgggaacacacatcaatccacgggcatacttagtcatgaaattaaccttttcgggagtagcttcactagcaagccccaccaaatcgccttctgcttcgcggtctgcatcatccatgacaattgctaaacccccttcttgcaaatgcttaatcgttgcttgaattttctttacatccattattttcggcctcctagtaaatttgcgactacatatttgcctaaaatatcggtttctagattaacttcatcccctactttaagcgtatctaagttagtcacgagttgagtgtgcggaatcagcccaaccgtaaaccagtcatcaccagtttccatcactgttaaacttacgccattaatcgcgacacttccttgcgctaccacttgaccatgcaggcgttgcggaagactaaattgcacttcaatagcattttcattgacagtccgcttaaaactcgtgatagttcgtcaacatgccccgttacaatatgaccttctagccgtgcgccgatttgcaatgaacgttcaagatttaccagggaccctttttccaagtttttgaacgttgtcttttcaaaggtttgtgacattaatgtcgtcgtaaattgattgttgttgatttctacgaccgttaaacatgtcccatttaccgcaattgaatcgccaagttgcacggtggttaaaaaatcatcactatgaggttcaaccaccaattcaatcgtttcgccatcttgggtaatttttactattcgtcccgtttccgcaactaaaccactaaacattttcaatcttcctttccgcaatcctaatattattttctaagattttaatttcctgatgggtaaaattcattgggcaagctagttccatgccgctaacaccttttttgccaagcatgtggggagctacgtatgtaataagctcttcaaataagccttcctgtaaaaaggcttgatggacagtcggacccccttccacataaacagattgaatttctcgacaaccaagttcatgcaagatgtcgttaattgaccacgtccggcgataaaacacccgaatgcctttagcaaactgatcttgtagcgaactattttccgtaaaaatccaagtaggtgcctgcccttcagtcaacaagtgtaaggttggattatcttttaaacgtccccggcggtcaagaacaatccttactggcggaaactttgtcggactagtcgttaataaagttggattatcgataattgcggtttggcttccaatcaagattccttgaaaattaccacgctcggtatgaaccatttttgccacagcagaattagtaatcgccgttcgttgacctttttctgcggccacgcgatagtcaagactcactgcttgttttaaagttacccatggtcgtcggtaccgatagaagaaatcgtaatgcggatttaagacctgtgctgcttccttaaggacgcccgttttgacagtaatattttgctgttgaagcgtagtaatccctttcccggtgacaagctggtgcgggtctgtttccgcgatcacaaccctcctgatacccgcgtcaataatcgcctgactacatggtggttgtttcccatagtgattgcagggttccaacgtgacataaagagttgctccctgtaactgtttcggcgtaagtttacctattgcatcccgttcagcgtgaattccaccgtattcgtgagtatgacctcgcgctaaaacttgaccatttttcacaacaactgccccaacgcgaggatttttccaagtttcattgccagcctttgctgcttcagcgattgccatttgcatgaaataaacatcttccactctaaccatcctttccaaaataaaaacgccctaagatttctctcgggacgttaaatagttaacttaaaaaacagctcggtaaaaataaaaccggataacatcactgctatccggggctttacgtttaaactgattgtgtcatttttagttttcttctcccatccagactatactgtcggtaccagattttcactggttcaaccgttaacataaatgctaacgggtcacggactccaagcgtacttgttaccgtcggttgggaatttcaccctgcccgaagaaaattagattgttaaatttacatatagtgtaactcttcactttctttttgtaaacagcaaatttatttctgtgagaaactttgcagggtatccatgatcaattggatgaatttctcacgatcaatatcaaggaggactttagtattttggggcttatcagttaactgatagtagtcacaaaccgtctctccccgtgtaagatcgccctgagtttcaacatccacattcattttgtcagtaccgaacatagtaggatcaatcaaccaagcaatcgtacatgggtcatggaggggtgcacctttaaaaccccattttggattttcatggtactgttcaaagaagtttaggagaccgtagaaggcttgagcgacaggattatcgatctgcccaatttgctcaatctcatctttcataatctgcgctttatgggtcacgttcaacggtgccattaccagaggcaggccgaagttcattacaatcttagctgcttctggatcaacaaaaatattaaattcaactgatggtcgccaattgccaagtcccattgccccacccatgaagacaatttgatcaatcttttcttttgccaagtcgggatagactcgcaagaataaggctgcatttgtcattggaccggtgacaactagagtgactttctcatcacttttacgaagagttttagcgatcaattcaatagccggaattggttgaactttgaaatcgggatcaggaaggtccgcaccatctaaacccgtctcaccatgaacttctggtgcagtttcaagcggctcaaccagcggagtttgattcccctgagcaactggaatatcttcacgatggagtaaagttaacatccgcatcgcattatttaaggttttgtccggtgtttggttaccagcagaagttgttacggcaaggacatcaatcttcggtgaagcaatggccatcgttaacgccaatgcatcatcatgtccgggatcgcagtcaaggattatctttttggtcatttgttatcggcatcctttctttgtgaattgttagtatagcggttacattaattataacaaatgaacattattctgtttaatgtcgatcaataaaatttaaaaagacataataaaaggaccacctaatcgtgatccttttcaatataagttataattttacgctttctttactaaataaattggtaaagcaatcgcgccagctaaaagggctaaaatagtaaacttcttctttgaatgcttcttaggttgtgtagttttatttttcttcataagaatctactcctttgttcaaaaacctatcactacctacactcttattttagccccattttgcctttacgtaaaaatatatgggccaggtaattaaagcaattataaataaccaaacaattatcttttgaaataggttaagtttccaaatatgtttcataggttcaccttatttctttttaagccagctaaatatcccatggcggtgcgcttgcttttcttgtgcctctgttaaccgggtaagcaattcagtcacctttgcatcagtatttaccttttgagcgtcccgagctacctcgctgctattatacttttgctgaagggtatcactgttaagccaccgatcaaaattagcaacatcgacaataaaaccggtactagtatattgataactaatccgatactttcgcggcaagtattggaagtaccgttccatcatcattgaaccattatttcgcgccgtactatctgaaaccttattaaaaagctgcttattaatttgcgcttttaactgaccatcctgctgaataaacgttagatcagcacccacttccgcctggttaatcagcattgtccaatcatttcgcccgacaaagagtgagtaatcataattatcatcaaagtagtctttaacaagctcaaacatcccaaattggtccatcgcttgtttcaagacatatttgatgggataaaggtaatccttctcaatcttttgttctgtctctggtgacacatcattgaagaattttgcgagttcaacttggcaataacgataaagctgatcgttagcgcgctcaagcaagtcatttaatttagcttcacgttcatcctcatccccggcaaaagttgattcaaagctgaggtaccataaacgacgcataatttccggtttaagggaaaattgcgatttactatcaccctcacgacgattcatcgtaaaaataaatgatgggagtggctgagttaaactacgattgttagtaatttctttaatgaagcgatcaaaatatggccgtgttgttaagtcggggctaatatcatcaatcatcattggattaacgggcccggcactatacatataatcgcttaagacggttgtaatagtcatattgatattggactttcctaatgcataatttttagcatcaaaaacaccgccatcaaggaaattgccactccccgttagcttggctgctagccgctttcccaaggtcgacttccctgttcgtccttgaccaatcaaggctactccaaggggtacatcttcgcgcgatttactacttggcgataattcatacatattccggattttccatagccaaggcgcctcaaataggaaacacatgaaatcacatgcctgccacccctcaccgacttctttgtaattatcgtactcatgggcaatatcactaaataattgcagctgttcacggagccggtcacccgttaaattcgatgttattaattctgactttacattatcaccaacacggggcgcttcaaataactgaccattgttataaaacaagactggtttagggtagaggtcttcttcacgggtaacctttcctgagttatcatcgtttcgagacacatgtttaactacctgggtaaggctgtagagttctttccctatattttcgagattgcgtttcttatagccagcattaccaaagagcttgacagtttgggcgacactcaatttttctggagctgatagtttctttaattcctcgtcagaactatactgatccttatattcttttacttcttctgccgggataatcaccgcatccttgtcaccggtatccttgtttttcaccatattcaccgtatcggtatagacattaatctgaagctgctctttatttttcgccttaatgaacccggccattttctttgcgtccagataggtagtcgcatggcgaaggttatcgttgaacatctggacatggcattgataaagcggatccgtctgcattccatagtcactgtcaagttgttctaaattatgatgaattgctgcttcggttaaattcatcgaaccggcaaatgaaagataccggtcgtcacttgtcattaagtacattttggtatgaattaattcttgcttagtgaataaaagttgcaagctaccatctaaaattcgcttcgtaaattcactatcagggtgttcataaccataattgacaaattcagtccggtcatttaactgcctcatccgtttgccaattgattctttcccattgtcgcttaagccgaggatcaaagtgaccttatcatagcgcggtaatagttgctcctcaataaacttaattgaagaaacaaatgaaacgcccctaaattcggttggcttttcaagatgctcacccgcgaattgccaaaaatcggcatcagaaatcaattcttgtttagtgtaatctaggatatctaacatgtgactcgcctcctttttagttaactttcaaattatatcatgaaaaaaagaaccactcgcaagtgattcttcggataaaaattagttcttctttgccagcttatatagtaagtacattggccaaattaaggctcctgcgacaagtgttaataaaacaatcttttggttctttgacaagttatgacatggacacttcatatttaatcgcctctttgttgatcagttaagttaattataacgcatttgggcgataatttaaggaagcgatttcagatttaaagaagatttagtatcttaaaacatattaccatcaattttatatgtcatataatgttcttttacttctactccaacttgatactgaatcattaaattagttaacatctcgccgttaaccagtgtaatatttaagtcctttgctgcgttgattgcaccttgagtaaatgtagaagttgtaataaatacacctctatctgcatgcttgagcttaattgaaccactaaatgctgtaatttctggcatttgaactgaattatctggcgcatatctttttacttgaagataaactttttgcaaacctagtgggtcttgattaataattccatcaattccatgatcatttgatttctgtgttactaaagcctgcccttcatcacccttgtaccccattacagataacaactgaaccattaagttttcaaatttatatggattcatttttaccaagtgatttaataattcatcctgcgttttttcgtcttgctgattaaaccattccttaacttgactttcagctaaatctttattttctcgcttctgtctatttttcttttgattacttttttcttgtttgtatttcttataagctggctcattatggatcaaagttctcgttatattaattccatattctttactaagctcttgcccgcgacgagtcgggagataaaggcctctcttgggtcggtttaataaacctgaaattgctaaatcacttaaagcaaaactaactcgattacgcatgaccaaatcatgactcttttgtggataacgcatgtcaacaccgattttaaaatgtaggatttcaccggtttaaaaatgtagtttttcaccgatttgtttctgttgtctgttgttcttgatagtctttcattcgatatgattttccagtaattttgaatatttcagaatggtgaactaagcgatctaagatcgcattcgcaattgttggattagagaatgtttgaccccacttggatagtggaatattagtggtaatgattgttgatttcttttcatatcgacgagctattaactggaagaaaagatctgatcccaaatcgtcaataggtagatagcctatttcatcaataatcaaaagcttataacgactgtagttttttaatattgcctcaagacgattttcttggtgggcaagtttgagccgttcaattagttcatgacaattgacaaaataagtactgagatgattcctacaggcctccattcctaatccagttgctaagtgcgttttgccaactcctgaagacccgatgaataagatattttgtgctaacgaaacaaaattcatcgattttaagttcatgatacggtttttatcaaccgaaggttgaaagttaaagtcaaaatcattcaagcctttgtcgtaaggaaagtgtgcaatatgaatggacattttagctgatcgttcagttcgatatgtgatttcttttgcagttagctgttctagagcttctgctaatgataaatcattattattcaagtaatttggcaaatattctttgattgcagtcagcttgagcttttctaaattgtcttctaattgtgtatagatagtcatccgtcattcctccactataattgatcaaacatgcgtaaatttatttctacctgttctgccaatttatcgtcatctaagtcatgaaaaatagttgtcccaaggatttccttcatatcatcgcgatgataatttagttttttattactcaggtaatgttgtcgaaccaatcgtgaggcatgataaatcattaatttttggtctgtaaccttgacgttaactgtttgcccgatatactttacaggtacagaatatttattgcctagataggtgatcatcgattcattactaactttgcgggttagatcgtgatcaactaatgaattcaaaaggattggattgtatggctgtaaatattctttttcttttatccataaatcttctggtctttgatcagttgcttagcttatttcgtgattgagctgtgtttcaagctgcttcacgatattttttaacgccttctcatcctgaaattcgtgattataaactttaatacggtctacggttctcgctaaggcttcgacttttcctttggtttggggacggaagggccgacaggcttggggaataaagcctgcggctttagagaaattcaataagcgtgaattccaaataacttttcgatagctactcttggcgtgatcaaccgccgttttcatattatcgaaataaattctttgaggaacaccgccagtattttgaaaagcctcaatcaaacattgaaatagtgtgtcttgtttacggtcaaaaactaactttaagaattttttgcgtgaataacccaatacatacagaaatagtgaaaaagtaatggggcggttttctctggtatataagactaagtcttctttccaatcaacctgacttacatcaccaggtgcagtttcaactctaatcactggctgctggtattgtgcttttttcaactggtgacagtaatcacgcaaaattgaaattccgccttcgtagcctaattctttaatgaaatagaaaatggctgttgcagaacaggttttgtatttatccttgataacatcacggtatgggtccaacttacttgggcaacgcttgttagtttgtcgtttaccggcttgtggattatttaaataccgcttaattgtcctagggtcgcaattatattgacggcctagggccgcataattaggtttaatttttgccattttgtaaaatattaactcctcttgtaattctagtcgcatcaaatcacctcaaaagatttaatgcaattagtataaaaaattgtaggaaaatcgacattttcaaatcggtgttttcctacattttagaaccggtgttaacataacgcatttgcaacatgctttgcggtaaattagcttcttctaaagttctttgtatcaattcactgctttgccaattctgtctttcaacggcaacttttaaaataactcctaaaaatgcatcccaagtcggagtaccatcggcttgatgttttaacgttgtatagtcaatcattttcagctcctaaaattcacttcaaatcgaagtaataatcatccaaagcatacgtattaactggcgtaatatgtaattgatatttttcaaccaattcagctagtgtctgcccgtcaattaatgttacagtattatttccttgggttgccttttttcgagcacgatctgtgaaatgattagttgtgataaatatcccatattcagcattaaaactatccattactcctttaaacttatcgatttcaggttctgatactgctccttttgtgtaccttttacattgaatcgctacccgactagttctgaattcatcagatgtaaaatatccaaagccatcgattccatggtcaccggaacgaacaattccgcgatctttatcaattacaacacccatttttgaaatcaataagcgcgaaaaactttcaaatttactaggatcaaacttcattaattgagtaatcaattggtttttccagtttaaatctttagtatcctcttggtcttctggtcctgttgattcgtctccgctttcttcacttactttatttttattacgttcagcacgttccttatttttcttatcccaataagcaccaatttcttttttctgttctaacgaaggataatttgttaaatcatcgttctctccggccttagtaagaacaatatcctgattacgatgaggagcttcaatatattgaatactgcgcaaatttcgaataccaaagttaaagtcaaacaagaatggtgaataagtgcccgttttaccttctttagttgaatagacttgatcataagttaatccatcatattcattatctgcaattgctttccaaatagattttcggcttgctgacccacccaaatctcttaatgccataataattgctttttctactgatcttctcttatattctgccatgatttcacccattaaatatatattctaaatacttattatatcgtaactttttaccagctatttctcagtattatcaataatttttataaaagtatgtattaatgttaaatgggagcagcgtaagttgggggagactcttactgggtttgaatatggtcttaatacacctgcaactgactacgatggtataaataagtatttgcgtattactgacattgacgatgtatctcataaattcgatatatcacatttaacttctcctaaattaaaagatgataattatcttttagccaatggtgatattctatttgcacgaactggtgctagtgttggtaaaagttacaggtacagtaatatcgacggtaaagtgtactatgctggttttttaatcaaagctcacattaaagaccacttttctactaattttatttttgatacaacacttctacctcgatatcattattttgttcaagtaacttctatgagatctgggcagcctggaatcaatgcaaaagaatatcaaaaatatataatttatacccctcggagaacgaacaaaacaagattagcgatttaatactaactattcaaaaattaattgatctccagcaacgaaaattggaacaacttaaacagctaaaaaaggcgctgttacaacaattatttgttgaaaaaaatagtaaacatccaattttaagatttaaaaactttaatggtgattgggaagagcgcaaattaagtgatattgcaaattatagaaacggaaaagctcatgagcaatatattgatatgaatggaatctatactgttgtaaattcaaaattcatttcaacaaatggtaaagtaaagaaattttcaaatgagccaatcgaactcttaaaaaaaggtgagatcgcttttgttttatctgatgtaccgaacggaaaagctctagcaaaggcctacttgatagatagtgataataaatacagtttaaatcagagaattgcaggaatttctcctagttccgatataaatagctattttctatatgtattaatgaacaggaatcgatactttttgaagttcgatgatggtgtaggtcaaacaaacctatcaaaaaaagatattgaagaattcaaagaaaactatccattatttgatgaacaacaaaaaatagctaatcttttttcacagattcaagcactaatcagtctccaacaaaacaaacatactcaactaatcgccttgaaaaagtatcttttacaaaagcttttcatctaaaaaaagtggtatcagcatttagtttactggtaccgctttttgtttagttcagttgagatagatgatgtaagactttattattatctttattttcgagttcctcaataatatgaatataggtttcttgggtcgttgtagtgttggcatggcccagtctcttagcaacactagcaactgacactccttcataaagtaataatgaggcatgggtatggcgtaaaccatgaacagaaatagttggtatatctaatttatagcaatatttttctaacaagccattaacagtcgagttaaatactcttttattgtgtggcacaaaaattggccagtcactttctttatttcgaataagtgacttaaattgattcataaggtgccaatcgaccatcacaacacgatttgaagattcattcttagttttttgaaaattaccaattggcgttttataattccaagatttattaacgataatttgctgcctttcaaaatcaaaatcttctggagttaaggctaacgcttccgcaaatcgtaagccagtctttgatactaataaaataaaccaatcccagtttaattcgtcacctagatcaagatggcggagtagtttttgcaattcataaaggttcaaaaatttattctttttattgctaggatcaactccctttataattgctcgccgtgtagggtcatgttccagtaatccttcgtctagtgcatcaactaaggctgcttttaggtgatgatgaaaatcaagagtagtttgtttttcatgagtagcagcatagttatttaacaatttttgatatgattggcgagtaagttcattcatatgtaactctggtgcaagttctttaatttttctatgcgttaaataatatttatccaacgttacttttcgaactgctttttccttataaagtttaatccaatccatatagtatttataaaatagctttgtactgtagtgtttccgagacataataaaacctccaataaataatctagtgtcaaaaacacaaatgtattatttattggaggttacgcttcatgcaataaattagataaagagcttttgaagaagatattttttaagaatagttaattgatcgattttagattgctggagtttaatcaaactatcaattttcattatcgtaatgcttattaggttttcttcttcaattttaggtaaacttaacttcaaatgttttactattttagcagataagttcccttgtcccccttgaagataggttgaaataatttttcttttgttcttaattaaccaagtttttataaaatacacgttgtctttttttaagttaattgccattacagcttgattaatagctccatcaatttgagctattccaacctctccactagttgctccataaagagcatataaaagtgtccctttttttataaatttagcagatgaattttttaatccatctggtgttaaatgtagctgagtggtatttttattaatttctgcagatctaatgaatgggatgttaccgccatagtaatccttattagaaatagccggagttcctccagaaaaagtatttgctatatcattaaatttatgaggcaaccaattatcattaaagtttttaaaccttaaaattggttgtttacaatctttatcaataaacattcgctgtaatgaaaaaatcttaagttgccttaattgttccaattttcgttgctggagatcaattaatttttgaatagttagtattaaatcgctaatcttgttttgttcgttctccgagggggtataaattatatatttttgatattcttttgcattgattccaggctgcccagatctcatagaagttacttgaacaaaataatgatatcgaggtagaagtgttgtatcaaaaataaaattagtagaaaagtggtctttaatgtgagctttgattaaaaaaccagcatagtacactttaccgtcgatattactgtacctgtaacttttaccaacactagcaccagttcgtgcaaatagaatatcaccattggctaaaagataattatcatcttttaatttaggagaagttaaatgtgatatatcgaatttatgagatacatcgtcaatgtcagtaatacgcaaatacttatttataccatcgtagtcagttgcaggtgtattaagaccatattcaaacccagtaagagcctcccccaacttacgctgctcccaatcatcagtaaatcctttaaaacggacttcaggcaccaatttttcgggctttttatccattacgctttacctcgttttctaacattttgataaattcgtttaagtctttttgggtcttctcgtcttttgaagttagctctttcatcatccccaaaagctcaccttgggtctgttcaatctctttttgagtctcttccatttcttttgttaacttcccaagatcaactggtggttcgggttcaaatgtgtcaacatatcgcggaatattaaggttatagtcgttttctttaatttcatcgatcgttgccacatgagcatacttatcaacgtcttttctttccttatatgtatcaattatcttatcaatatcttcttttcgtaagacgttttggttcttacccttttcaaagtttttgcttgcgtcaataaacaatacatctttattttctttattcttctttaagacaagtacaactgtcggaattccagttgaatagaataaatttgctggcaacccaataattgcatcaatctgatttttctctaataaagctttccgaatctgagcttccttagcaccacggaatagaaccccgtgtggcaaaacaattgccatcgttccatcttgttttaagtgatataggccatgcaaaagaaaggcatagtccgcttttgtcttcggtgccaatgctccatactccttaaaacgaggatcttttagcttattatcattgttatcccatcgtgcagagtaaggcggattagccacaaccatgtcaaaactatgtggatgatctaccccatgttcgtctactccatcaggccaatccatttcaagcgtatctgcattttttagcgtcatgttttggtaacgaacatcgtgcatcattaaattcatccgcgctaaattataagttgtcgtgtttagttcttgaccagcatattttaacttcttaccaggaacttgatcttgaaccgtcagtaagagagagcctgatccacatgcaaagtcatatacttctggattctgaatctttgagtctaaatctaaagctaccaatttagctaatatttctgaaacttggtgtggggtatagaactcaccagccttttttcctgagtttgtggcaaactgctgaattaaataagtataaatatcagcgaggatatctttgccgttttcatctttatattcaatttgatctatcaagttaacaatatctgttaatgctttagctctagcagcagtagtattacctaggcgagaatttccaagattcatatcatcaaaaattccatggaaatccattttagcattatgattaagattcaaattatgattaaaattatctaacatatcttgatagtctgacggtgcaattgtattgttattgactctatcgacaattgatgcccaagtatatttaggggcaattgcataacctaatgcccctgcaatttcaggtaatgcgtcaactagttcttcttctggtatacccaaatatgcatcatttacactttggttattttcaggaaatactactttaccttttaataaatattcttcctgattttctgatagataacggtagaatacgaaacctaaaatgtaatttctatattcaccagcatccatattacttcttaagcgattcgccatttcccaaatctgactctcaatttctcttgtagtactcaattaaaaaactcctaatatttttctttagttcatcagcaaattcagttatattttcacgaagtatccttctatatttaaatctattcatatttcgtatttcttcagcttcagcatcagtcttgtatactgcttggccttccatgacgatgttgtcgagctctccatttccgtttaggtcatcggcgccaatgacatgcttatctaagatttcatttattaaatgtgaatcttcaatatcagctagtccccactttttcttatactcaaaaatggcagaacgttgttgcccttcattattttgggcaattaactttttaacgtgcttttgttgcacagggtattcaaatttaacctttcctttgaagagatccttaataaatcttagaattttggccgcatatccccgatcttctaatttatcagaaataatctttacttcttcagcggattttttagcgccctcaatgtcgttatcgtgatacttattcatcacttcaacaatcaatccctcaaggtaatcccaattgaccttcacttctttaacgtgttccatttggaggtcaacttgcgagaaatcaatatgatgccttttagcaatttttgtttttagccgatttgctaaagtggttgttaagatttcttcatcatccaagctcatccccaatgaagttaataatttttcaggatgtgtatcgtcatatttatcgtcttgtttggcaattgccatcaaatggttatattggcgtaagtctttgtacatttgttcttgtgcattttcgcttgctgggatatcagtaaaatcttctgaaaaaccagctaacctgtttactaccttatgcaactctttcttaacttcaccataggaaggggcaataacaccatcgtttttaccttcatcgttaaaaagttcttcttgaatgttagcggagttgcggtttgcatattttgccaatgcacttttcattaacttttccgtgtgtttaggccatcggtaatttacaattcggccgaatggcttagtttgcatatcctgaacccggtttgttcgcgaatatgcttggattaaagctgcaccctttaatgtccgatctacataaagagtatttaattgtggtgcattaaagcccgttaataattggtcaacaacgatcacaagatcaaagtatttgccatcatcaattgtccgattcaatcgcgaaactacttgttctgtatattctttaacctgcttatcattaaagctagtaccaaacatttcattgtagtcttgcattgcgttacgcaaagaatcatttgtctctagctgattatcaccattggacgtatcttgactaaaggtaattccaattcgtaatggatgttcccttttcgcattttgcttcttaaattcgttataatactccatcgccattggagttgatgctttcccgccaccaacatgagtagtaagaattgcattgtacttactattaacagagcgtttattccaatttttcaagatatcctcaacgaccaactcaacatgtttatgattttcatcatagacacttggctcaaccttatcgtccatgtcgttttcattcatgttggcgattcgttcttggatttcctcatctgtcatcttaggatagcgagccttaaaatactctggcagatattgttctctcagtactttttcagttaatgttgtctcaaaatccaccttgaatccaagaacattaccatctttaatggcatcttgaattgtataagtatgaataacatccccaaagatatcacgagttgtcggcgttttagacttaccattttcttctggaaagacaggagtcccagtataaccaacccaggccgatttaggaaaaactttccgaattctttgcagcatttctccagaagttgagcggtgagcctcatcaacaataaagacaagattcttatcaacaggcttgaagtcattgcttcgaaccattgcatccatcttttgagtagaagttacaataattccgtttcctttacgcttcaatttattagctaatgcccacgattagcagtatcagtaactactcccccattacttccttcagtattttcaggatcatacgccatatattcatcaactgtttggttagttaaggccactcgatcaaccataaatacaactttatcaacattaggtaatcgtgatgcaagccaggcagccttaaatgaactgatggttttaccagatccagttgtatgccaaacatatccgattcgttgatcatcaatcccaaacgtatgctcacgaattttgttaatgacccgttttgttgcataaacttgatatggacgcataatctttatcatttgatgacgggtgttccatccaaaatcatataatttgttgccatttgatgggccatcggaatcgataacattagatccgcaaattgcattgcatctagcactggtttattatcctttgctcgttgccattgaaaagcaaaatcggtattaaacttgtcagctgtcgtattagccatgtaacgtgcatcatgtggtgttaaggcaactagaatttgaagagtgccaaaaaatatcagaatattggtcttcttcgatatattgatgcatttggtttaacgcttctttagcatcccgaccatcagctttttcctcaatttggataatcggtaaaccatttattaacattgttacatcaaaacgacgattcttccgtcctggaattactgctggacgctcaatctgattaacaatttgataaacagtattcccagcgcctatttgatcctggtcaaaaactgttaaatatacatgtttaccatcatcacgatcaatttcaatttgcgatattccattagtcccgtatagaaactgcccagcttcatagggagtatttaatttattgactatcgccttcacttgattaaattcggttggcgataacggtttctctaggcggtcttgattatgttgctcaagaatacgcttaaagttgtcccacaattgatctgttgttttaatctgtggtaagtattcccattgcttagttccacctaaattactaagatggttaattaattcattttcaaatgctaattcgctcttccaaatagtcatttaataacccactttaactttatattctttaacattataagaaaaattaacactcctatgcaacgtaagtaaaaacatttaagcattttactaagttttagcaaaaaagtatccttttatttttaatttatgcaataattaacttgttgttagaaattaaggttatacttaaaggagattttattatgactgaacaaaaagttgctgttattactggtagtagtcgtggtatcggaaagggcattgcggaacaactaggaaaagatggctatgcaatggtcattaatggttatcataaagaagaaacagacaagacaaccaaagaattagctgacaaaggatataaggttgtggcagctcctggtgacgtttcaaaaaaggaaactcatgaaatgcttgtaaaagctgctgtggataactttggacgccttgacacttacattaacaatgccggaattgcacaaattggtaatctcctagacgaatcagccgaagaatttcataaaatttacgctactaatgttgatagtgttctgtttgggattcaagctgctgctgaacaattcaggaagcaagatgatggagataaaatccgtaaaatcatcaatgcttcaagtatcgctggacacattggttatgaacaattaggagcatactcttcaactaaatttgctattcgtggattaacacaagtagctgctaaggaattagctaaatttaatattacggttaatgcctattgcccaggtattgtgggtaccgatatgtgggactttatcgacgaaaagatggttgaagaaaatggtggtgaaaaaggtcaatacttaaaggccgctattgacggaattgctcttggtcgtgttgaacatccatcagacgtcgctaactttgtctcctacctcgcttcagacaaatctgactacatgactggtcaagctgtccaaattgacggtggagttcaatttatctaatttagttttcaatataaaatagtaattccctaaccctgataaaaaattaccaaggctagggattttttatcctccccaaatcataagtcaatctacatcccccaaaatgctataatcaaagcaaacctatcaaaggaggagaattgtatgtttgaagcttacaaatactactgggaaaacgcctttaagtaccgggctacttcaacgcgggcggatttttggtggccagtattagttaatttcatcatttttgttattttatatttcttactagcaatcgctggttttgcttctgtcacttcgattatgaatggctataatcgtggcgttggattcttaattttcttgctcttcgttattgcagtattcgctattgctattattattcccggaattgctatctgtgtccggcgggttcgcgataccggtttgactggctggaccgtattggttttctggttactttcccttatttttacaagtaacgacagtgcagtgatggaaactatttcctcagtcattgatataatcttcttagtgattctctgcttgccaactggttacgtcaataaacaaggttggtggagcgctaactacgacaacgatgttaaggttctatcattacgaaacaataattaaattaaaagagctggtgcctcaaaatgcagcatcagctcttttaatttagtcaattttaattatcccttgtaaataggttggtatgaaccccgcaaagtgatcttatcaagtccgttatcgaggttgtacttatcgtcactaagcttcttttcccggtaacctgcccgtgaaaaagcttcgactaagcgcgccataaattcttgaccaccttctgcagtttcataaatcatgtggtcaatgtattgtggcatgtttgtactcttccgcaataaagtgattaagtacacctgcttatcagtcttgttaatttctgaggtattttgcatcaatgacatatctatttcctcctattcaatccaagaattctcttcctactcatattataaattatgtacaggattagtcaaaactgtttatcaaaaaaatgagcgaaaacacgaataagttaatttagaaaataaatgtcctcctgtaaaatataataatatttttaccctaaccctgtaattttcgttaattaagtgttactataatggcgaaaggaagcataatcatggaaattaatgcagatgctcttaagaacttccaagattcgaagttcaattttgtagatgcagatggtaatgatgtagactttgataacttggacgaaagtgtaaagtacactcttcgtgatggtgaaacagttgttgaagatgatatgcatgccaaggacgttgttgataccattaataatgaatatggtaaaacaatgaacgtttaatttcttgatatgtagaattaaaaataggttcctatcactcaatctttgatagggacctatttttttactatctaaattgcttctcttgcccaagagttctaaaattagaaataaattgaaagataagggactcttatttatgatgaacattttattaatcatcttaacggcaatttttattatcgaaagtatttttgaagttcgttatttttaccaaattcgaaccatttttaatcaatctggccgtattgaacctactaaacgagttcagcgaatcgtcacaattgaaactcagtggtcatggatttcatggatcttcttactcttactgtttgttttaccagacgtgtataccgctattctcatctgtgtcattacccttattgaaacatgggtagtctacgaactttacaacgctcgcgaatatgctaagaaaattaatgaaaaataataaaagtaaagaggaaggtgttacaagcttaacgccttccccttttttatgctacacgcacttttgttaacagttcataaacataagacaactcacttggacgaaaggcgccatggagggtccccacttttttaaagccgctcttagttgcgatccgttgcattgccatattattttcatttgtgcttaaacgaattgatttgatttctggacgctcggtctccaaatactcaatcaaactcaaaaataatttggatgcatatccttttcctgcgtgtcgtgaatgaatagctacgcggtggattacaacataattttcagtattaattagccattccccgttgagtttgtcataaaaatgatccggtgcttcaacaattgctaacgtgccaactgtttgtccatcatctgctttaacgagataagcataaccattctcaatatcttcttttacatgggtaacgttcggataatccccctgccattggtcaacgccccgctcagctaactggttacgtccatcacgtaaaatatctactactacatctaaatctgccattgttgctttccggattttcattgtaatccctccttaaaatcgttgcttatagctaaaccataacaaattaagcaactaatagtatcacaccttgagattcatatgcaattactttttatttttaattttaggaaatcgataaacttatattaaataagctattgacatcgcttacatctaatattatattattaggtgtaacgataaactaaagcgttttcaaataaataaagggagaattactacaatgaattattttatcggtgttgatgttggaactacttctacaaaggcagttctatatgaccaaaatgcaactgtgttagatcaatttagccaaggttattccctttaccgcgatgctagtggaatggctgaacaaaacccaactgcaattgtcgaagcagtcgaaaaagttattcatgatgcagcacaaaaagcagatttaacaaatggaaaattgttagcggtatcattttctagtgctaaccaaagtgtgattatgctcgacaagaatttcaatcccctttcacgggtcatcacttgggctgatacccgtgcacgtgatgtcgccaacgaattaaagaatagtcctgctggtcagcaaatctatgctaaaacaggtacacctattcatccaatgtccccattgaccaagattatgtggctcaataagacacaagcagataaggttgctcaaactgcatattttggcgatatcaaatcctacctcttccaccagtttttcaatacatttaaggttgatgtttccatcgcttcatgtaccggaatgatgaatgtcaatacgtgtgactgggacgatcaagcattggaactcgctaacgtcgactgttcccaattaccagaaatcgtgaacggaacaacccaagcgattggcctaacagcagcggcgcaagcaaaaatgggtatcccgctgacacgccatttgtctatggtgcctttgacggtgctttatctaatttaggtgtgggggcaattaagcaaaatactgttgccattacgattggaacttcggctggtgttcgggtagtaactgaccatccagtgatcgatcctcagcaacgactcttctgttacgccgtggataaaggtttatgggtcatcggcggtccgcttaataatggtggcgatgtctatcagtgggccgttgaacacttagttgacgctagtgcagttaaaaatgaaaatattgatccctacactcttgctaaccgagttattgaaggtgttcccgccggagctcacggtttgctcttccacccattccttggcggtgaacgggcaccattatgggacgctaatgcgcgcggtagtttctttggactttcccacattcatactcgtgccgatatgctgcgctcagtaatggaaggaatttgtatgaatattgcaactgttttccaagcggttcgtgatcttgttggtaatcctgcaagcgtaactgcaactggcggttttgcgcgagctgaagtttggcggcaaatgttagcagatgtcttgaactgtccggtcaatatcccgaactcatttgaatctggttgtctcggtgcaatcaccatggcaatgaagagtttaggaatgattgaaaactatgaaatcattaaaacattagttggtgatatcagttcttatcagccaaatcaagatgcggttaatgtttatcaaaattacttaccactttttaagcaggtcgaaggattattaacaccagcctattcgaccatcgctaaattacaacaacaatctactactcattagggggttattattatgcctttacttattgttttaatcggggttattatcttaattttcatgattgttaaactaaagatgaacactttcgttggtttagtaatcacatcattcatcgttggtttgttactcggccttccacttacaaaaattccgcagacaattgaaaccgggatcgggggccaattaggacacttagctattatctttggtttcgggtcaatgcttggtaaattagtttctgatgccggtggtggatatcgaattgcaacaacattgattaataagtttggtcggcgttggatccaagttgctgttatccttgcctcctttatcattgggttagcattattctttgaagttgggcttgtcgttgttttaccaattatctttattatcgcccacgagcttgatatgccattgatgtatcttggtattccaatggcagcaaccttaaacgttacccacgctttcttaccaccacatcctgctccaactgctatcacggacattcttggtgcaaaccttggacacgtcttgctgcttggtattttagctgcaatcccaacaatcattattgctggtccagtttataactgggtattacaaaaagtttatccgcgtgtttaccgtaaaaatattgatatttcagttcttggcgaatataaagaattcaagcttgaagaaacgcctaaattcggtatctccgttttaactgcaatgatgccagttatcttaattgctgtcgctactatttgttcatttattttccctaagaacaatccagttaatgaattcattcaatttattggtgctcctgaccttgcaatgcttctttcattaatcttcgcaatctttacaatgggattatggcgaaacaagaaaatggaagaaatttcaaccgcccttgccgactcaatcaagcaaatttctgtaatgcttttgatcatcggtggtggtggtgccttcaagcaagtccttgttgatggtggaatttcaaaatatatttctggtttattcgctcaaactaacatttcaccaattctagctgcttggttaattactgctttattacggatgtcacttggatcctcaacagttgctgcgatgaccgctgccggccttgtggttccaatggctcaccaatttggcggtaactcaattatggcaacattgatggttctttccatcggtgctggttctgtcttttgtggacacgttaatgatgccggtttctggatgatcaaagaatactttggcctttcattaaaggaaactttactttcgtggacaactttaacttccgtcttagcactcgctgggttgggagccgtctacgccatttcattatttgtctaagtcaatttaagcgtcctagtgaattagctagtgacgctttttgtatggtttggtattcttaataatagtagaactattaaggatgatgaataaacaaatgacgcaacatactactatcgctgacgttgctaaagcagctggtgtttcagcgactaccgtttcacgtattattaatggtcgttatgataaaatgcgcccagcaacgcggaaacgggtggaaaaagcaattaaagaccttcaatttgttccaaccgcttctgcacgacagcttcgccaaactcatagtcacgttgttggaatcctcgttggagatatttctaaccccttttcatctttacttgccaaagggatcgatgatgttttgcaacaagcgggctatgatatcctcctcatgaatacgaataactcgcgggaaaatgaaagtcgtgctcttcagcgtctatatcagcaacgagttgacggaattattgtccagcctaattcccgccactttagtcaatttgcccctactattcacaatgatattcccctcgtgattgttgaccgtgaagttgatgaccagccttctacagttgggaaggtcacttctgctaatcgtgatgcttgttataacctcggtaagattctttatcaaaatggttatcagaatattttaactgtcagcgcgcattttgcggaggcatcgggtcaaatccctcgaattgccggtttaaaggttgctgctgctgataatgggctaagctatcacaatattgaaactcggggacatgatcggcagtggcttgctaaaatgtttttgcaacagttaaatgaactcaaaggcaaaactgctgtcgtttcattaatggggcccattttatttgatcttttagcgatttttaaggaactaaacctttccttccctgacgatcttggcttagttagctttgatgattgggaatggtcgcaatatgtcgctaatggaatctttctgttgaagcaagatatggagttaatgggtagcttagcagctaataagcttttaacacagattaaccaacaaagtaccatcagttccactacccttttaccagttgaaatcattgcacaccagtcactttagcatataatattacaaagagaattaaattgagttttaaaggagaacaataaatgaactacttaattggtgttgacgttggaacctctagcacaaaggccgttttatatggtcaagatgcgcaggtgatcacacaagctaactatggctacgagttgcaccgcaatgccgcgggaatggcagaacaagagccagaagaagtaatcaatgctgctgaacaagctatccatgatgtggctacggcagctgatctcagtacggggaaactactagcagtctcaatttcaagtgcaaatcaaagcctcctcttattagataaaaataagaagcctctttcacggttaatcacttgggcagatagtcgagctcagcgcgcagcagacaaccttaagatgatgactgaaggacaacaattatatatgaagacgggggttcctgttcaccctatgtcaaccttgacaaagctcctttggttaagggaagacgaacctgatttatttaaccgcacagcatattttgctgatattaaggcttaccttttctaccggttatttaatgaatttaaggttgatatgtcaatcgcttcctcaactggcttgatgaaccttaaaacttgtgattgggatgaccaggctcttcgggttgcaggaataaccaaagatcaactgcctgaaattgtcgatggaacaactcaagcaactggtttagtgcccgaagcccaagaaaaactaggagtaccagctgatacgccatttgtttatggtgcttacgatggtgccctttcaaatattggtgttggtgcaaccaagcaaaatacagtagcaattacaatcggtacttccgcagctgtacgagtcgtaactgatcatcctgttattgatccagaacgccgcctcttctgctatgctattaataaaggattgtgggtcgttggtggtccgcttaataacggtggcgatgtctatgaatgggcagtaaaacaccttgtcgatagtagcgcagttaaaaacgaacaggtcgatccttatactttggcaaatcacgttattgaaggagtaccagcaggcgcgcatgggcttctctttcatcccttcctgggcggtgaacgggcaccattgtggaatgctaaagcgcgtggtagtttctttgggctttctcatatccatacacgggctgatatgctacgagcagttatggaaggaattagcatgaacattgcaacagtcttccaagcagtacgagcgttagtcggtgaaccagcgagcgttactgcaacaggtggctttgctcgctcaaaagtatggcgccaaatgcttgctgatatcttaaactgtccggttaacgttcctgactcatttgaatctggctgcctcgggtcagtagttatggctatgcaaagcctgggaatgatcgacagtcttgatacaccacagaagttcattggtaaggttagttcttaccaaccagatccagccgcagtaaaagtatatcaacgctatactccactcttccaacaaattgaagatatgcttgctccggcttattctgaaatcgctaaactacaagaacgccaaaacaattaaagaatcaaaaaatcgatcttacaatcattttccgatgtgagatcgattttttaattatgactattctgttaacaggttcttaatattacctttagcatttcaaaaagtaatgtaaaacgcttccaaacatgttactattagcttgtactaaaaaattatttatagaaaggaagtggtactaatggccgcatggaaaaaatggtgggtttcatttgtaatgatgcttcaagtaatcgttggaattgttgtcgtatcattatggttttatcgtgaccaaacttggacaattccagttaatgattggctttatagccccatcggtcaaagtttttcagcaggagtcgcagtatttttaatcattgttgctttaaccgtaatagcaattgctgtttttcgtcccacaacaactaaacaaatgacaatcgctagagatggcgctaataaagttcaaattgatcagcatgcagttgaacacagcttaactacttcaattgccaaatttgacctttataacccagtgattaacctcaagatgcaccgtaacaatcacaacgcagacgtcaccgttcatggaatgctctctaagaggaccaatccaaaactaattcatacagtactactccagacaattaaagaaaaccttaaacgggacttcgacattgatcttaataaattacacattaagctaagtccctactcaaacaaagaatcagtcaacattgtctaaaaaggaggtactatatgaaacttgctacaattggcgttatcttaggactgcttatcagcattagttggattatgtggggctttttcccaatgattggcattctgttagctgtcactatcttaggcggaattggctatgttcttgatgcaagaggctattcattaaataaacttgcgataaaaatgttagataaatttgccaactaattcaaggaggaattaatatgacaaccactacaaataataaaacaattgatgagcaattaacattcgatgatcaagtaattgaaaaaatcgctgggatcaccgctagcaaagttcctggaatcctttcccttgatggaaatatgtttagtgaattagcagataaagtaacttccggaagcaatccaaccaagggtattaatgccgatgttggtgaaaagcaagtcgcattaaaaatggaagctaccatcgaatatggcaaaagcgctccagaaatttttaaggcagtttgttctgaggtacaacacgcaatcaataaaatgactggcttgaatttagttaagtttgagctacatatcaatgatgttaaaacaagagaagaagtagaaaaagatacaaaataagggaacgagccaagtatcacgggcactttcgttttcaacatgaagcccctatatgcaacataggcctccagcgttcggctttaccgggcgttgggggcctatttcgaaatgtgactgaacttttatcacactcttttacataataatcatttaaaatggcggcctaaaataactaaatcacgtttaatcccatcaagctctgctacttgtggtaaaaggccccattgagtaaaaccaaacgatttaaataactttaggcttggaatattatggccaaaaatataagccacgattgtattaactgctaaattaggcaattgaccaataatgaattccatggtttttgtaccaactccttgtttccgcaaccgttgatcaaggtaaatagcaatttcactagtatgattatatgctggacgaccataaaaatgttcaagggccacccacccgagaacctcattttgatgttcaattacccagattggatgattttcgtcaaatgcttcaaaccattctttgcgttcgtcaaccgttatcggggtgagatctgcagtcgctaaccgtgatggaataatttgattataaatttcaacaattttgggtaaatcttcaagtgtcgctttgcggtattgtaactccactatactttcctctaaaaaatttcctgaactaatttttctgaaccattcgaactaacccaatcatcatacttaataaaattccgattgatgctagcaaggtatatcgccgtaattgttgattttcttcagttaatagttttatttctcgtcgcatagcttttttcttcactgtaagcaccgccttcgttaattctaacaagatcatcatatcatattatttgcgattgcttcttaatattttatctttatcctgttaatgactacataaggaagtgtgtagagggtatgatttttaacgatattattagcattttattattttgcgcgtttgcttatctttttaattttaactttcaccgcgataactatgcctatgctattgtgatgtttatcggcataatggtattttatggcgatttttaccatcatctcccaatcaactggaaattgtatattttacttattgctacttttttatgggctttattcacaatcttcatggggagacaagcattaattaaaccagctcaacgtaaacatttttcctatgcaacgattattggaatttttgcaattattatcacttttatcttcaggattattctttaaaaacaataagggagcatgatcatgaagtcgtatctggcttctatcacgctcccttattatattgctagcaatcgtgtgctcgatcaatttgagaatttaagtctgtattactaagatccagaacttcaagattatctgttaaaacgcgtttaggactgacaagtggcattgtaaagtaacgcgggttaaaccttacttccatttcatcatcaaattgaactgctgtatggtctttaataaaaacatcccctaaattagaggtaatcttttcattataatcgggggtatctaaatcctctttgacaaggattagtcgataatcaccatctaaactgcaacccccaacggcagaaaatggaccaaccccatcatcaaaatctaggagtatcttcttagatgacagttcataacgctgtaaacgttcgatagcttgatcagtaaatgtgatattcattaatatcaaccccatttcttaaaatctgtacttatattttaactaattaagaataagctttgaaatttaaagctcaaaaaaactgagaaaaatcgcaaaatctttctcagttttttaaattaatttatttattaaccttcgaatgcatcagtcaaaggaggaacaacttgcttcttccgtgatacaacacccggtaaattcatccgcttgttttcgttaagcttcttaccaaaggctgcttcaaccttttcagcaggatcaccaataactaataactctgagtcactgtttaagatgttagtagcgattaataagaataaatcataattgttatcatccatcatactttgcatttgactttcaagatcagcttgacgagcaaaaacatcatctaaatcaacggtgttaacttgaccaatacgaactttcttgccgccaagttcaaaggtcttagcatcaccatcaacgatatcagcatcagacttagcaccaaggttagtaccagccttaagcatttcaatgccgtacttttcgtaatcttcaacaccagcgatctttgctaagtacttaacagcttcacgatcgtggtcagttgtagttggtgacttcaaaagcaaggtatcagaaatgatagcagaaagcatcatcccagccaagttagcgggaatattaatgtgcttttcttggaacaattctgtaatgattgtacttacacaaccgtaaggacgaacagttgcccagagtggttgagccgtttcaaagccggcaattcggtggtggtcaactaagtgcgttacagtgaccttgtcgatatcattaacactttgttgtggttcgttgtggtctacaagcattaccttatctacttcgtttgcagcggtttcgattacgcgtggtgcttccataccgaaagtcttcaatgcaaacttagtctcatcatttggttcacctaaagcaactgcttcagtttcgtatcccaattgattttggaagtatgaaaatgccattgcagcggtaatcgcatctgtatcaggcttttggtgtccaaatactaattctttgctcatataaattcctcctgtttgttcactactttaatcttagttatttctagtaggtgaaacaatctacattttctattctatcatggaagttaatagattaaagaacaattattaaatatctttcctattatgaataaaatcttttaagatctgccacatttgttcatgctgactgttaaaaaaacgtggtggttctttatctaacgaaaaatattcagtagttgtcgtttctgtaattttgggctgataatgcttagcgctactttcttcaactaagtaaaaagcattaactggttgaacgcggtcaccattaggataagtgtaaaaattctgatcaaaaattgctagtcgtttgacaggcacgacttcaattcccgcatcttctttaaattcccgctttacagtttgctcaaaagattcgccaaattccatgtagccgcctgggaaaccccaatcaccagtgtccgcccgttcttgaagtaaaacagccttctgcttgtttaagagtgccccagaagcactggtcattattaagggacgattcccaactaaatcacgaatttctttaatatacgccaaacttttcgccttcttttaattttggctaacaggttcttcggataaaacattcgtttgtttcattcgaagttttattggttccccttgcgtatcggtatcaattacaaaagttccatttgacttaatcgaacttagatgatggtcagtagccattatatcttggaatgctggccggttagtaatagtctcaaaagcaccttgataatcatggtcgtaagcaaggaagtctgcaatttcatgaggatgtgatttcaaccgccgaaggacaagttcgccccgccgtgctcgtgccccaacttcaatctcatcaactggcatttccttaaatgcacctcgttgagtaattacagcaatatcttgaccatccttaaccaagatttgatctgctacttggtcatcatctttcaaattaatggcccgtacaccagctgtccggattcctgttacaggaacatctgcaacatcataccgcactgcatatccttggcgactaatcgtcaatagtgaacggttctcatttgttggttcatagtaatcaacatttacaacttgcgcattatccctaagcttaattgcgacacttgcatggctcttgtaacgtgaaccaggcttatagtcattaaaggccgtttgctttacttgaccatcgctagttcccatgatgattgttcctggctgatctagtttatcaaaaatcattgctttaatgatctcttcattatccgctaaaccgattgtttgtgagatatgttcgccggtatctttccaccgggcatctgcaatttcatgaattgggcggtaaataatatgcccaagattggtaaacataaataaatgcgataatgtatttgtttgttgaatcaataatgggtaatcgtcttctcggagaccgttttcttctgcctccgatgccttgaaggaacgaatgctgcttcgtttgatatagcccgcatgcgaaactaagaccacaacatcttcgttggcaaccgtaactttagtatcaatctcaagtttttcaacaagattttcaatcttggtccgtcgtggattgccaaattccttcttaatggccctaatttccttagtaagaacttttgctagctcattttcgttagtcaagattaactgatattcattaatccgtgaatttaattgttcttgttcttttttcagctcagttacatccgtatttgttaagcgataaagttgcaaggtaacaattgcttcggcctgttcaggtgtaaagttgtattcttttactaagttttcctttgcatccttacgattcttacttgctcgaatcgttttaatgaccttatctaaaattgagagtgctttgattaacccttcgacaatatgcaatcgttgttgagccttcgttaggttatattgtgtccgtcgacgaataatctctttctggaattcaagataggaagtcaaaattcgcttcaatccaacacgcattggccgctggtcatcaatcgcaaccatattgaagttatagttaatctgtaaatcagtgttctttaataagtaattaagaataccgttcgcattagctccccgctttagttcgattgcaattcgtaatccactacgatcagtttcatcgcgagcttccgcgattccctcaacttttttggcaaggcgcagatcgttaattcgcttaactagttgcgccttatttacttcataaggaatctccgtcacattaatttgttgacgatcaccccgcaaggtttcaatctccgtttttgctcgcactacaacccgaccgcgaccagtctggtatgccttacgaatgccatcaatcccctgaatgattccaccagttgggaaatcagggccaggaataaattccattaacttatccaaagaagcagttggatgcttgataagataaatcagtgcatcaagaacttcgcttaaattatgtgttggaatctcagtagcatatccagcagaaattccagttgctccattaacgagtaagttaggaatacgtgctggtaaaactgtcggttctttttcagtatcatcaaagtttaaggccatttcaactgtatctttgtcgatatcttgaagcattaaacctgctattttactaagccgcgcttcagtataacgcatggccgctggtggatcaccatccattgatccattgttaccatgcatttcaattaggggttcacgtaatttccaatcctgacttagccgaactaatgcttcataaattgaactatcaccgtgggggtggaagttacccattacgttcccgactgatttagcagacttacgaaaccctttatcataagtatttccatctttattcatggcaaataaaatccggcgctgaaccggttttaatccgtcacgaatgtcaggtaaagctcgttcttgaataattgattttgaataacgcccaaaacgatcacccatgatctgttcgagcgtcatatgttcaatttttccgtttctcacaaaacttgattcccttctctatttattccatgtattaattgtaggctctttagtttgaggtaattgtcctttattctcaactaatttatcagattcttgatcatcggctaacgtgaattggacattttcttcaatccattctcgccgtggttccaccttattacccattaaggtagttacacgacgctcagctaattcagcatcctcgatccgaacttggattagtgtccgagtttctggattcatcgtcgtttcccacaactgatcagcattcatttcaccaagccctttgaaccgttgtaattgtgctcccttgcccatctttttagtcaattttgttaattcttcattagtccacgcatacgtgatattagtcttagctccacgtccgcgttgcaagcgataaagtggtggaagagcaatatagatctttccagcttcgatcattggccgcatatatttgtagaaaaaggtaagaagaagaatctgaatatgagcaccatcatcatcggcatcagtcataataataatcttatcgtagtttgaatcttcaacgttaaattcagaaccagcaccagcaccaacagtatagataattgtgttcaattcttcgttttttaatacatcatctaacttcgccttttctgtatttagcactttccctcgtaatggtaaaattgcttggaatttacggtcacgcccctgcttggctgaaccaccggccgaatccccttcgactaggaataattcatttttcttagcattttttgattgggccggagtcaattttccagaaagattgcgttcttttttgccctttcgtttaccaccacgagcttgattacgggctttacgggcagcttctcgagcttcacgcgcctttaatgccttacgaattaacatctgagcaaagtcgccattttccattagggcatagttaagctgctcactgacaatcgcatcaacaatcttccgtgcttcaggagttcccagtttatcctttgtctgaccctcaaattgaagtagacgttcaggaatccggacagaaataacggctgttaacccttcccgaacatcactaccttctagatttttatcattagcctttaacagcccaaccttttttgcgtattcattgaaagttttcgtccaggcactccggaatccggcttcatgagtaccaccatctggagttcggacattattgacaaatgataacaagctctcagagtaaccatcattatattgagccgctacttcaacttcgaccccatcttgctttccgtcaaagtagagcgtctttcctaaaacgtccttaccctcgttaagataagaaacgaattcttgaattccattgtcaaattggaatacatcttgtttttcttgaccagctcgcttatcggtaaggataatcttaatccctttcaataaaaaggccgactcacggagccgattagctaaggtattgtagtcataaacagtagttgaaaaaatcttcgggtccggcttgaatgagacggtcgttccgttctcagctttagtttttcctaattttttcaacgttccaactggttgaccgccatccttaaaaatttcttggtaacggacgtgatcacggacaattgtcagcgtcaaatgtgatgataaggcatttactacggaagctccaacaccatgaagccctcctgaagttttataaccatctgactgaccaaattttcctccagcatggagaaccgtcataataacttcaggtgtcggcttaccggaagcatgcatcccaaccggcatcccccgaccatgatcttgaactgtaatcgcattgtctgcttcaatggtgacgttaatctcatcaccataaccggataatgcttcatcaacggcattatctactatttcatataccaggtggtgcaatccacgtgagtcagtagacccaatatacatccctggtctttttcgtactgcctcaagcccttttaatacttgtatggatgaggcatcatattttacttcttctttggccacaaaatgacctcccattgccaatattatacctaaacgtatgttcggaaaattattttaccatttacatttgctaattgtaaagctaaaccggccacaatttcaattcataattaaaatgatactgaaaacttagtagattggcaaattgtgtcgttagtgtaagattttcataggttggatgaataattcatctggtcgtggaaatcttttttgtagaccaatttacttatttacaaaaaaagaaaagaccagtagcctttagtgtgtcgaatactaagcaaaggcaggtctttcctcatggatattttaacagaaatcgagcagaatttggtgaaatcaggcagtttatttgaagctgaacagattattttaaaaggggtattggagttaggacaagtaatcatgcaaaactttttggaaagcttagatcgaagcttaaagtcccaagctccagcgaactatcaagtaattaataaacagccacggacgcttaattttatctttggcccggtgacttttcaacgacggtattatcaggctgggacaaagaaacgtgaattttacttagaccaacaattaaaaattaaaccacgtcgtcgtttatcgccacactacttaatgatgatggctaagattgcccaaacaactacaatgcgcaatactgccgacattttgaaccttgtatttgacagcggaattactgccgattcggtaatgcacgccgtgcatgagttaggaaatcaggtagctaaacaaactcaagcaaaagaacaccaagctactcctcgccatatgcctaaaaatttaactattgagggtgatgcctttatgattaaaggtaaaaaagaagcaggtcagctgactcttgtgcaccattatcgggtttatgagcgagtagctaatcaaatcattaatcggcatgactttctcagtgttgggcaccaaggacggcttgaagcacgactaagtgattatttagaccgccattataagcttgccggtcaaacgatctttttggccagtgacgctggcccaggttacgaaccagctaagctattaagtctagttcctcaaagtgcacatggtgaatactttctcgaccgctatcattgtttgcagaaaattgaacatactttaggccggcacaacgaattagccatgcgagcaattaaagccgttcgtcatcatgatcaagcagagctaacaataattttagatacttatgaatcacaaaacctaacggaaaaacaagcagatgacctaatgcgtttaagaaagtatctacagcgaaattggcggtatatcctctcaccacaaatgcgtggatttaaggatattcatttaattggttcagtcgaaagttctcaccgggcttttacttaccggatgaagaaacagggcaagtcatggactaagcagggggctaaagccatgattggtttaattgaagcccgaatgaatggtgaactgcaagctagtttaaatataatcctagaacaattaacagttcttcctcgagtggctcaaaccagcctattacaggaaatgcatattcgaactggagagtttctaagaaaggcaccgacaaagccgtcaattggagcagtacaaggaataattccgattaacacggccacaagtagaccaatgggacaactttttaaggcactaacccactaaaactgtatatttaaaggctacctatgaaaacttgacagatacaattgtgtcttcctagtggttaaaattaaatattcatgctatgcttaaaagctgtataagctattattaaggagctatttatatgatttttgaaattattgggatgattattattgcttacctcttaggttcaatcccaactggcctctggatcggtaagtatatttatcataaagatattcgcaagttaggtagcggtaatatcggaacaacaaatacctttcgaacattgggatttaaggcgggcgtcgttgttttggttatcgatattctaaagggaacactcgctgccagtcagccatactttttagggatatctggaaccgttaaccccctattgatcggactctttggtagtcttggtcacactgtatcaatattcgataattttcatggcgggaaagcagtggcaactagcgcggggattctcttagcttataaccccctcctctttgttgttgcctgtttgatttttatctttgtcttatgcttgacaagtatggttagtaccgccagtatggtagggattagtgcaattttcattattgccctcttcattcatgcttggattttagcaatcgtggcaggaatattaacaggagtggtcttttaccgccaccgatcaaacattcaccgaattttatcaggaaaagaatcaatggtaagttttggccttggctattatttacgagaaaagaagctaaataaataggagactggaaatggaaagtttcacagtctcctattttttcgttaaaatggcttaatactaaaatgataattatctgtttcatttggtgctagacggtgcatcccttgcttatggaggaggagcccatcagccttgacattatctgctattccccaccatggttccacacatacaaatggagctgtacttggatattgcgaccaaactcccacgtattctgtattaaaagtatcaactacgaccccgtgattagcaacagtatccgttaatttggctgtaaaatggccgccatctgttttgaaaataatagcatccttattaaaaagatcatgattaagtgataatgaatcctgcatattaatcaattgtggatgagctgaatcgttataggcgccatctaaaatgatccgtgaatattctgttgccggtttaacgcttaattctgtttgttcaaaactcccagtactagttaacggcatattaaaaccaggatgtgctccaatggcatagattaaggtttcatctccgctcgggttcttcaccacatagctaatttcaactttatcaataactaattcaaattttacttgaagactaaatgaaaaagggaatgccttcttagtttcactatcatcatgctgttccatcacaaccatcgatggtgtttgctcaataacttggaattttcgatcacgtgcaaaaccatgttgtgtttgatgataagtttggttgccatattgatattgatcatcttttaagcggccaacgaacggaaagaggattggtgcttggcgattccatgaagcggggtccccctgccataagtattcgattccgttatcctgccgtttaatactatgtagttgagcacctaattcatcaatttttacggttaattgttggttttgtaaagtaatcattgttatcgatcccttcaattgataatcgtttaacattaagtatataaaaaaggttccaaacgcacaatagcagattttggaacccttttcaataaatgtttaagtaaaactcagtaaaaatgaagtagagtttttacttctgaacttcttcttggtagtctccatttggacagacaacctgtttaccacccttgactttcttttcaacaaggaagtgcccatccttaggacaattacgtccaatcggtttatcccatgaaacgaagtcacaatctggataacgggaacaaccatagaaagttcggttcttctttgattttcgttcaacaaccgttccttgcccacactttggacatgtaattccggtatcttttacaatcgccttggtattccgacaatttgggaaacgagaacatgcatagaacttaccataacgacccattttaataaccattggggccccgcaaatttcacaatctgtgccagcaagctcatctttcatctcaatcttatcaacctcttcttcagctgcatcaacttcttttgagaatggttgatagaatttatcaacaacattaatccagttctgcttaccctcttcaatctcatcaagtttgccttcaatatcggcagtaaattggacattgacaatatcagggaattgcttttcgataattcggttgacaatttcacccaattcagttggctcaaagtggcgtgatacaaggcgaacatagtaccgtcgttgaatcgtatcaagggttggcgcataggttgatggccgaccgacgccattttcttccaaggttttaataagagccgcttctgtataacgagcaggtggctgggtaaagtgctgagctggatcgtcctttatcatttttgccttgtcaccttcagttaattctggcaacaagttatctttttcagttcctcgcttatatactttcgtaaacccagggaacttaacttttgatccatttgcacggaaatcgaccccattttgctggaggttaacgctcatcgtatcaattacttccgcagtaatttgactagccacaaaccgcgaccaaatcaaattataaagtttatactggtcggaggttaaatattgcttcattttagctggtgtccgatagactgaagttggccgaatagcttcgtgagcatcctgggccccttcaggtaattttcccttaaccggctttattgccgcatattctgctccatagttttcatgaatatagttagacgcttcatgcttagcaattgacgccacccgagtcgagtccgtccgcatataggtaattaacccaaccggtgctccttctttaatgtcgatcccttcatataacatttgtgctgccatcattgtctttcgtgttcggaagttcaaacgacgattagcatcctgttgcatggtcgaggtcgtatatggtggctgtggttgccgccgacgttcttttttagtcaccttagtaatatcgaaatctttctttttatcgattttagaaaggactgcctgaacatcatcattattcttcaaggaaaccttcttaccattttcaccgtaaaaactagccttgaattcttctttgcccttcttgaaatcagcatcaattgtccagtattcctctggtttgaagtttttaatttcattttcacgttgaataatcagataaagggcaactgattgaacacgaccagcacttaagccctttttgactttcttccataaaattgggctaattgaatatccaactaatcgatctaatacccgtcgtgcctgctgggcatccacgagatccatattaatctctcggggttccttaaaagcttctttaacagcatctttagtaatttcattaaaggtaacccggttcttttgatcatcgtcaagctttaaaatatttgaaacgtgccaggcaattgcttccccttcacgatccgggtcagatgcaagatatacggcttttgcatttttaacgtccttccgtagttccttaattacatcacccttccccgaattgaaatgtaatcaggggtgtagtcattttcaatatctacccccatccggctttttggcaagtcccgaatatgacctaaactagccacaaccttataggaccggcctaaaaatttaccgattgtttttgcctttgatggtgactccacgatcaccagattttttttaatttttgaacggcgacgagttgtctttttcgccgttgatttggttgttttggttgccattctggtaggctcctaacatttttaatatttcattcaataatattattaatccatttgactaccatctgtcaaatataatctctaattgaacaaaatattttaatcaacttctcaccagaaatcaagcccttgaatcgtacagccgaaactcatctagcagatcttgggcgctgagaattggtttcgcgccagctgcgattaaactgttacatcctactgataagggagcatcaatccttccaggaatagcgcatacagaccgattttcatctaaaccgatattagccgtgattaaactcccactccttttctttgcctcgacaaccaaaaccacttcgcttaaacctgcaataattcggttcctttctgggaagtgataagccacaggtgattcaccccgcccatactcagaaattactaatccctgtctggcaacctcatcttgaaggacttggtgacttcgggggtaagcttgatctaaacccgtcccaatcactccgatagtaaggccaccatgttttaacgccagttcatggctaaaaccatctactccttgagctaaaccactgattactactatctgccgcttaattactggtggcagcaatcctcgtaaagcgctctgtccataattagttatctgcctagtgccaacaacaccaattgaaggctgatggagcaagctcagattaccacgataaaacaataccaagggcggacagtacgtttctttcaaggtgatcgggtataacggatccgcaattgtaataaatttttcctgactgtttaaggccactgcttgatcaagctctggacttgtccaattatttttcaatgacgacgcacttcgtaagctaacatttgcatggtcaatcaaatagtcaatattattaaagcagcgcgcctgttgagcacactcccatagacgatactttgaaactaagccaattccgcgacataaacttaaccgtaatagaaaatcgtttacttgtaacataaaaaagcctccctatatttatatacgaaagctttttgaaaatgcattttttaatttaaatattttggaacgggattaaaagaacgccgatgaataggagttgcccccattttttctaagccggctaaatgttctttggttccataacccatattttgtgcaaaaccataccctggataaacataatcatagtcccgcattaggtgatcacggtattcttttgcgacaatactggctgcagcaacgctaatactcttttgatcccccttgatcaaagtcgtctgaggaatatcaattgctaacgggacagcatcaacaatcagatgatctggtcgatggtgaaggtgattaactgcccgaatcattgcatcctgagtagcagcataaatattcatttgatcaatcactggcgcatcatttaccgcaatgctaacttcaaccgcctcatcaacaatccgtaaatacaaattttctcgttcatgcctagttaactgtttggaatctgttacccctatcaggtcaaaatctgcatttaaaattactacacaagtaaccaccggcccagccaatggtcctcttcctacttcatccattcctgcaacatactgatatcccttttcccagtagtacttttcatatttaaaccggttattgaacgcctcttcagcttccttctgccgtgcaagccgccgttcaaattgctgaattgctgcttgaacaccttttcgcgaatcatcacgaatagtttgcaagtaaggatcagttgtatctgtgatagtttgtaaacgggccttaatttgactaatggtttccttattcatttagtccatcctcatttaggtcagcaggtacttccaaagtgattggtcctaattttccctttcgcaagtcaaaaatcaagcgttcactagcccggtcataatcatcacgaaagcccattttagcagtaatcgttaatagtaaatctggattggcaaccgattcgtccagatctgcatcagttaagtggtaacgttgctttaacatctctggctgatgttgccgcaagtaatcaagggcaaacaacgctacatcatcctttgcatataagctatctttaattgctcctgttaaagcaagcattatcccctgcttaggagtagcaaatttatgccaaaggacaccaggagtatcaagtaattccaattctgctgatgaccgcaaccattgctgtccagtagtgactccgggacggtttccagtagccgcaacgttcttttttaccaggtgatttaaaagagttgatttccctacattgggaacaccaacacacattgcccgaattggcctctttttcattcccttggctttttcttctgccaatctatcttttaatatctctttacttttagccgttacaacttttgccacgttattttggcgtgaatcgagagcaagaactggttgattatgttgctcaaagtatttaatccattcatttaatcgtttctggtctgctaggtccgtttttgtcataattaaaagtttgggcttttctcctgcagctagtgccacttctggattttgtgacgaataggggacacgagcatctactagctcaaacaaaatatctactagtggcatttgttcacgaatttggcgtaatgcttttgccatgtgtcctgggaaccattgaattgttgccatttgactttctcccttcttttctaattcattgcatcaatataccgttgccaagcttcatcaaaaattgtcattgatggcaaatagtcagcattttcttccaaataatgcgaaatttcatcaaaatcctctgaatgcttaggaaaagtagtatccaaaaaagcgttgtttgcaaattgttgaacttcatctgcactattcggatttcgttgagtcattaaaaactgataaaaactcattctcattttgatttcctccaatatttattcattacttgttgggaccgtgattaaaaacttaaaccgtccttcttgcatgttaatttcctgagccgagtacttaagagaacggtgcttgctataacggttaaggtctaataaaactgtcttcttttgtgggttaattgttacccatttaggaatattataattctttgcaatgtaacccatcacaaatttgatcgggatatttaaccgtccaactgaaagtcccttagcccgcaacaagacatttccgttacttagtcgttcaggaataaagttaatggcaaatcgcaccttagcccctagaaacttagtatttcctgtcaaggtagcatactgatcgccaacaataaaatcataacggatcttttgcccttttaaaaactgattcaggtaattagcagctaaagcattcacctgttttttattcaattcaaccgttactgatgaatcgcttggctttactgctttgctagttgtagtagcaggagtcggtgcagtcaccttgtttaacacaaccccacagctaattacaatcaaggctactaagaaaaaaaagccccatttccaccaattagtcttttttcttcagaatttttcatttttacctccgtgtgaattcccagctatcatgtttttgcattaccttaaataattggtcagcaattttgacgtatcccgtatgattaggatggaaattatcttctgttgaaatatatttattaaggttcttatccttatgattcataatttcaatgacccgcttttgactgacttgcccttgattagccttttcttcttccttgaccagctgttgttgctgactcttagtctgatattgaccgtatgacatcaacttattaatgttcacaaaatacattgacttataattattcattgtatcttgcgtagtttggttccattgattaattgacttgttaataattgttacatctgggaaatagatatagaagggattataaatactcatcacaaaaataggagccttaggattttcctttcgaactgcatcaaatagcttaattaatttttttgataagtcttttcgccactttcaacactactggtaacttgccgttcagagcccattacgtttttttccaagatctgcatcaagtcgttcccaccaacagtcatcgtaatcacatccgcgctctgtaagtcactacgtaattgagattgctgatttaagcggtcaagaatctggtcggatcggtcccctgttaccccgtaattgactgttgtcaccttagtttggtggtaacggtgttcgattttttccttaattaccccaacgtatccaccattattactctcatccccttgaccgtgagtaagggaatcgcctagtgcaaccagctttacatttttcttttcaacatactttggtgtaacaacttttgaactattactagttaaatttgtaaagtggttaacagtataccatcccccaccaataatcataatagccaaaagcgataataatagccatttagtccactttttcatctattctatagtcctttattttaaaattttaagaagatagaggctgggaaaaatttccatttttctcagcctccacttatttttatcaaagattattctgtatagtatagcaaacaacaagcacccattccagtgtgagttgcaataattggcactgtctctcgaacagtaacctcgatttctggataaaattcttttatttttgctaataagcgttctacttctttgccagcatcgacatgagaaattccaattcgcttaacttttggtccccgtgccatttcatctaaaatcttatcccattccttatgcattgatttaatgccacggccttttgattcaatatgaatctgaccgtcatacacatggagcataaccttaatgtttaataggttagaaatagcaccagcaaatttactaattcggccaccagcaactaaattatcaaggttatcaattgccaagtaaagttcagatttactaagtacttctttcatcttagcaattgcatcttcaacgctaccaccagcttcaatcacttgggctgcttcaattatttcgaagcccattacttggtcggttgactgggaatcgtagactgtaacttttgtctttgtcattccagccgcttgttcagccgcatggacggtcccactaattgattccatcattgtaacgcataatacttcgctaccatcttcacctagcttatcaaaggcatctacaaacttcccaattggtggctgagaagtctttggtagtgacttagcattcttcatcatttcagggaactgttcgtttgtaattgtttcacgctcaacgtataccgtcccatcaatcattacacttaatggtataattgtaatgtcatattttttaatttcttcatcagttaatcctgctgatgagtcacaaacaatttttatctttgccatgaaacttaccactcttcctgaacaatttgtgctataattatctagtattgagaactagataatttatttcaagtactattatactcaattttatctaattttgtaggatcaattactatttatttagtataacaaaaatattttaaaaattcattggtctttggaaagaggttttttgatggatagacaaaaagagacaagagatcggcgtactttgctgatagaaataggtaatgcggttactcatgggattggagcaggactatcgattgctggcttgatcttgttaattatcagagctgttcatactggtagtcccatgcgaattgttacctttactatttacggaagtgctttaattcttttttacctttcgtcaaccttatttcatgccttgatctttacacgagctaaacgggtctttcaaattctcgaccattcaatgatctttgtgcttattgccgcgacttataccccctattgtttagttagtatccgcggctggttaggctggacaattttcggcgtgatttggggcttatctgttattggaatcgtgtataaatgtatttggttaaaacataaaagtaaatattcaaccattatttacattctaatgggctggctatgtctagttgccttcatgcctctctggtatgcgcttggtccagttggcttcggattgcttttactaggaggactttcctttactcttggcgccctcttttacagccggccaacggcatatacccatttgatttggcatatttttgtcctcatcggcacgatattaatgtacttttcaattcttttatacgtttagttcccattcttcaaaacgacaaattagctggtcatctttttcataattattgtggtttactaagtgccaacggtcataatcgatcgttggcatttttgtatctccaacaatttgcttatttatcaccgttcgtgttagctttgtcgccattgggagtaattgctgatagatcgttgccccaccgattacaaaatattcgtttggatttgctttaagatattctttaagggcagctaaagaatgaacgactttcactccttcagcatctatgttctgactggtaagcacaatattttctcgcttaggcaacggtttattgccaagagaagcaaaagtttttcgccccattataattgggtgaccagtagtttttgtcttaaaatgcttcatatcagcagaaacatgccacggaattgtattatctttgccaatccaaccattcaaatcttccgcccagattaaattcagttcactcattttgaaccactccttttaaactgctacgggagccttgattgccggctcataagtatagccttctaatttaatatcagtcatttcatattgatcgattggttttggttcagcaggtaaaatcaatttaggagcttcatgaggtgttcttgtcagctgttctttaacttgatcaaggtggttcagataaatgtgagcatcccctaatgtatgaacaaactcgccaggttctagaccacattgatgagcaatcatatgcgtcaataatgcataactagcgatattgaatggaactcctaaaaagatatcggcgctccgttgatagagctgacaactaagctttccatcattaacataaaattggaacattgtgtgacatggagggagagccatggaaggaacatcttctggattccaagctgaaacaatcatccgtcgtgaatctggagtagttttaatctgctggataacattagcaatttgatcaattgtgtcgccttgactcgtcttccattttcgccactgacttccataaacaagccctaaatcgccatacttttgggcaaaatcatcatcttcaagaattcgctgacaaaatgccttcttttcttggagatagacctgcttaaactctggatctttaagccagcggtgaccaaagtctgtcatatctgagccttgatattcagcactttccacccacttcttaaatgcccattcatcccaaatatgattcttgtgttgaagtaagaagcgaatgttagtgtcacctcgtaaaaaccatagtaattcactcttaatcaagccaaatgggactttcttggtagttaaaataggaaaacctttgcttaagtcaaaccgcatctgatatccgaaaacagacttagtaccagttcctgtccgatcacccttttgatgtccattcgtcaaaacataacgaattaagtctaagtattgctcttcatttatatttgttgccatccttatgttcccttcctttactcgtcaacgtatgtgcttaaatactcccaacgagctgtcttttcatcaattttttcttgtatttcatttagctgcttctgtaacttagcaattttcgtataatcgcttgctgcttcagccatttcattttctaattgctgatgctgttgatcaagggcgtctaattcttcatcaatatgatcccactcgagttgttcagcataagtaagttttgttttttcttttttggctggttcttgcttacttgcctgctttttagcaagggctttttgatcatttttaagctctttatccttatctgcttcttctttttagcagttaaataatcagtaaagcgtcccgtataacgctcaatatcaccatttccattgaagactagcaaattgtcggccactttatctaagaaataacgatcatgagaaaccgtaataacagttcccgcaaaattatctaggtaatcttcaagaactgtcagtgttccaatatcaaggtcgttagttggttcatctagtaataagacgttaggctgctgcattaagatttttaagaggtataatcgtcgcttttcacccccagaaagctttcggatcaaagtaccatgcataaagcgagggaataggaaacgttctaataattgggtaacgctaagcttattaccatctttatcagtaacattatctgcaatttcagacaagaaactaatcatccgcttatcattgtcaattccttctgtttgctgggtataatatcctaacttaacggtttcaccaatcttaaggacaccactatctagagggacacgttgggcaattacgtttaataaactcgtcttacctgccccgttttcaccagtaattccaattcgatcacctgcctgaacaagccaattgaagtcatggaggatttgatgattatcaaattttaagttagcatccttaaattgaataacatctttccctagacgttgtgatccaagattaatagcaatatcttcatcggttttaagattacctatttttccttctaattcgtggaaccgattgattcgccccttttgttttgtggaacgggcttttgcacctgtccgcatccaggctaattcttttttatacagctgttgattctttttctcagtatctttagctaattctactcgttccgccttttttgctacaaagtcctgataatttccctcgtagtgataaagtttaccaaaagatagttcccagatatgatttgtaatttgatcaaggaagtaccgatcgtgggtaacaacaaggacggcacccttataactacgaagaaaatcttggagccaaactaccgaatcgaggtctaagtggttagtcggttcatccagtaataagagatctggctgttgaattaagacttgtgctagcccaacccgtttcttttgtcctccagaaagttgagcaatcttttgacttacatcttttatctttaactgggtcagaatcgtcttcacccgactatctgcttcccatgcatcttcttgatccattcgtgcctgcatttttgtgtaacggtcgattgcttgtggatcttccgggtgcttcgtaaagcgttcaagcgccagctcatattggcgaatcgtttcaaacactggttgtttaccttcaaaaacagcttccatgattgttttattttcatcaagctctggttgctgctttaaataaccgatcgtataatcattgggtttagtgatctgaccgccaccttctgggtttacttccccactaattacgttaagaagacttgttttcccgcttccattaacaccaatcagtccaattcgatcattttcattgataataaacgaaatatcatcaaataaggtcttttcaccgtatgtgctggttaggccctctgcacgcattgtttgcatattatccctctttcgttatctcttctactttttctaataaggttgttgcatcgttagctatttcgccatttactactgccaacgttaattgctgaagaatcttccccatcaatggtcccggttttacccccgctttagtaattaatattcgaccatcaattgctaattctttagcgtttttaattggtaatttttgataagctttttgtaattcctcatcattaattgcccatccatataacttagctacttggttagcatcatggagggctgtttcaccggtattaaacattagtgttggcgtaagcgtacgttgacgaattgcttggactgctggaactacttttttgacctgcgcaattaaatcatttgctgtcttccacttctttaagaatttaccaatttctttttgatcaagctggagctgtaagctcaaaactgaccacaattgggcctcattttccaaatgccattggttaaggattaataaagccgataaagcagcttgcgcattttccaaccctggacaatattggtacaatccagtcgcaataaaatcttttaaacccgctactggattttgacccagcaatagtttttctagttcaacccggattcgttcaactgcaattttttctaataatggtgcattttctttaatcccttttaatgttgcagtatcaatgacaaaatcaagcttacttgcaaaacgcacggcccgcatcatccgtaaagcatcttcatgaaaacgttcattagggttgccaactgctttaataagatgtttttgcaaatcttctagtccgtcaaatagatcaataacttccccatcttcccgtaaggcgagggcattaattgtgaagtctcgacgctggagatcttcacttaatgaacgaacaaaagtcactttatcaggacggcggtagtcttggtaacctgactcggttctaaaagtagttgtttcatatcccgttccatggtcgagaatcataactgtaccatgttcaattccggtatcgacagtatggttaaaaatcgcctttatttcactagggtaagcactcgtcgctatatctatatcatgaatctcatcatgcaaaatagtgtcacggacacaaccgccaacaaaatatgcttcgtagccggcctcctctattttttgtaaaacagggcgtgctggttcaaatatagctggtaatttttttattttcatttaatcatgtcctcattttgataatcaaagttgattataacaaattaagttactactaaaaagagacaggaagcgtaaagaacggctaaaagcgttaacgtttcctgtctcatttaaattaaaaattatttgtaatcttcatattggtcataaagatcttgcatttcagtgtctgttgggactaaccagagatagtgttccaattcatccattaacttatcagtttcaccagtttcgcggtagtaattaattaattcttttaagaatgttggattttcactgtatgccggcaaagcagcttcataatattttccggctaattcaagctgatcagttcgttgatatgaccgcgctaggttccaatataattgtggatctgtttcatcttcttttaccaatggactcaggagcttaatgtttgcctcatcatcgtgttggtgaagcaagaaattactatattgtaaagtaatcgtcatattctctggagcaagttcatgcgcttttaccaagtatttcttcattaacttttggtcaccaaggtagctggtaatttcagctgctaatgaataaaggtattcattgtattgatcaacactgagcccttcttggataactcgtaatgcctgctgatacttattttccttttcatatgcctttgctagttcaggataagcagacgcatattggttatcatcattgataagatcctctaaggtttttattgccttttcagtatctcctaattgaagtcgggtcaaccccttttggaaacgaatatcactagtctggtattccggtttaacctgattgaagtaccctaaagccttcttaaactgaccgctctgagcgtaacaaatccctagacgtccagcgatatcaacttttgcaaagtcagtatacccatttttaattagttggaagtaatattggattgcttcagaatattggccaaccataaagtaaaattcaccaagcgcaaattcaacagctggttcatcgggagccaacgcgtaagcttcttttaacttttcctccgtcacttcaaattcttcttcggtttgatataagtccgcggcaaccagtaatgattgaacataagctggcgagtctggtttaatctgggctaagtatgataaagcttcgtcattatgtccttcatcaattgcaatcgtcgctaaattagtctttaattcatcttcatctggataacaatctaataattttaagtaaatcgttcgtgcctgttgaagaaagcccaatgcgtacaattcctccgcaaggctaaataacatatcatcatcatcattaattagtgcgagtttaaatgagttttgggcttcttttaattttcctgcttctaattgatcaagcatttgttctgagtaggtcatattatgccctccttttactatcacttttaaatatatcacaatcgatgattttaagcattgaacaagtctttaaaaagaaaagagactgggaagagtaaattctttcctagtctctttttaacatttaactgttaattacttaacagcgtcctttaaagctttaccaggcttgaatgctggtaccttgcttgcaggaatgttgatttcttctccagtttgtgggttgcggcccttacgtgcagcacgttgacgtacttcgaagttaccgaagccgatcaattgaaccttttcacccttagctaaagatgcttgaattgaactgaaaacagcatctacagctgcagtagcatccttcttggttaagccagttgcagtagcaacattgcttactaattctgctttgtttgccatgttgtttcacctcccacaaataacgagagtgttaaactcacgtctgtgaatgttaattttgagtggtccaaaattaacgaaataactacgagaagttcgtatcatttcattgttaagattagcatagtgaaagcctgctgacaagcggttttctcaacttctagccgcatttttaatgttttttcattttacaatgaattctttaacttttactgccgttgacgcttgattaaatggatcggtgtaccagaaaagtcaaatgccttccgaatttgattttccaaataacgctcataggagaagtgcattaactctggatcattaacaaagataacaaatgttggtggttcggttgcaacctgtgtcccatagtatactcgcaaacgccgaccattttgtgttggagtcggattggcaacaattgcatccattaaaacatcatttaagactgccgattggatccgttgacggtgatgttgatatacttcctcgatcaatcccggtaattgatttaaccgttgctttgtcttcgccgaaacgaaaataattggtgcataactgaggtactggaattcttgccgaatcagattagtaaaatctgtcatcgttcggtggtctttttcttttaatgtatcccacttattaacgacgataataaccccacatcctgcttcatgagcatatccagcaatgtgcttatctaattcacgaataccttcttctgcatttaggacaacaagtacaacatcactatcatcaattgctcgcatggaccgcatcaatgaataacgctcagtgttctcataaatttttccttttttgcggattccagcagtatcaaccattgtgaatttttgtccatctgctgtttcaaattgagtattaatggcatcacgggtagttccggcaacgttagatacaattacccggttctcacctagaattgcattaaccagtgatgatttccccacattaggacgcccgataaagctaaagtgaatggagtcatcttcatcattagctgcgttatcaggaaactctttaataacagcatccaaaagatcacccattccaataccgtgaacacttgaaactgcatacggttcacccagaccaagggaatagtaatcataaatatcactccgccgttctggattatcgactttattaacagctaagaccactggtttattggagcgatataaaattcgtgctacttgttcatcagcatcagttacaccattttctacatcggcaacgaagattattacatccgcttcatcaatagcaacttctgcttgttggcgaatctgtgtcaataatggttgatctgatatttcgatcccgccagtatcaatcatgctaaaatgtttccctaaccattcagcatgagcataaatacgatctcgagtaactccaggagtatcttcaacaattgaaatccgttctcccgcaatacgattgaataatgttgattttccaacgtttggacgaccaacaactgctacgattggatttgccaatctttccaccttctttcattttattttaaatgattaaagagggagtgggaaagaagtcgcttgcgacttcgttttcccaccctcgcgaggatggctaggcattccggacgttgatttatcaacgttcggaatccagccagctactgcgctactgtataaatacctttaaaaaaagtaaagagactgagttaattcccagcctccccttaaaagataattaatttaagaaactagttccgtaggtccttaagcttgtcaccaattaagtcacccattgagaagccactttcttcttctggagcgttgttcatgaagctccggttgttattgttacgacgtgaacgacgacgaccacggtagttttcaccgttgttattgttgttttcgtcttcctttggacgttcttcaagagccttcattgataaaccaagacgttggtgttcaggatcaacattgattaccttaacttgaacttcttgacctggcttaagaacatctgcaggtgtagcaatgtgcttgtgtgagatttgtgaaatgtgaactaaaccttcaacaccagggaatacttcaacgaaagcaccaaagctagtcaaacgcttaacagtaccagttaatacgctgtctactggagccttttcttcaatatcatcccatggtcctggtaaagtttgcttaatggataatgaaatccgttcacgttcagggtcaacgcttaataccttaaccttaacatcttgaccagcagtcaatacatcagaaggcttgtcaacgtgatcgtatgaaatttcagaaacgtgaaccaatccatcaacgccgccaaggtcaataaatgcaccgaagttagtcatccgtgcaactttaccttcaacaacatcgcctggttgtaattcagcaaataccttttcagcagccttttcgtgttgagcttgaatgatttccttgtgtgaaagaatcaaacggttttcgcttggttcgatttcaacaatcttgaattcaagttcttgacccttaaattgattaaggtcttcaacatagtgatcagtaatcattgaagcagggacgaagccacgaactccagcatcaacgactaatccacccttaacagcttgagtgaccttggcggtaatgtgttcaccttcatcaaatttcttttgaatgtcatcccataccttacgggcttcaagacgacggtgagaaagaaggtagctaccattttccttatcgttaccgatcttagaaatgacaactaagtctaattcgtcacctacttttacagcatcattgatgtcttcaactggcttggttgataattccttagcagggacgacaccttcaacccctgcatctttaataccaacgatagcttgacgatcgtcatcgattgccaaaacttcacccttgacaacatcgcccaccttaacttgttcaatgctatcaagcgcttctaacatatcgtttttattttcgttgttttcagccattaaaaaaaatcctccttgcaacaatcaactctaaaagatattttactaaaatttgtttcacatttccagtatttaggctaattcatcttgtgttttttttattattttactgatttcactcacaacttcatcaattgtcatatttgttgtatccaatttgattgcatcaggtgcttgtgtaagaggtgaaacttttcgcgttgagtcttttttatcccttaattcaattgctttttgtaattcttcaagcgatgttgtattaatcccttttgcttggttttcagcgtatcgccgtcgcgcccgttcataggcactcgctaccatgaatatctttacgggtgcttgtggtaaaacagttgtaccaatatcccgtccatccattacaattccaccattttcagcaatttgccgctgttgcttagtcatctcttcgcgaacagctggaactgccgccacagcagatacatttgctgctactttcggcaaccgaatatcatgagtcacctctttgccatccaagaaaactctttgttcagtttcaccaggttcaaaatctatttttatttgccgagcaatttcagcaacctttttatcatcttttggatcaatgccctggtttaatgctgctaatgtaacagctcggtacattgcgccggtatcacaatagacataattaaacttttttgctactaatttagcgaccgtactctttcctgctgaggccggaccatcaattgctacttgcaatcccttacacattattagttattcactcctctattttcaatccaatacactactctatcaaaaaattgctgctaatactctatttttaacgataacggtttgtattttctgtattattattgtagcgattataggtttggttattgttataacgctgctgataactactgtagcgattaggagtagtccggttttgatacccattaccataacgataactactactatatcgataataactactactgctttgcggagcactataactttggctggtttgtgtcgaacttgattcctcaatacttgaagaagaggattcactactgcttacactagattccttctttgaatgctcactagaggtactcgaactgtgagattctttttttttactattttcagaactagcaactacttgttcagttctcaccggatgattaaaggactgtttattattaatccaataaataagtggtgtagcggcgagaacgataattaatacgattaagatcgtagtaatcattgaattatgtgatcgttgcttacggtgttctgttcgtgataaatggccatcactatcaaggtcttcgttatctgtaaactttttatcccataattcatcattagctcgtcggctctctttccgttcctcactcaaagtaatcatgcctccttattttgagaattaacattctgattgtatcgcaaacttttgatgattgtctagcaacaacacgaaactttaattttcagtaatatttaacaggccctttaagcggtcttcccatcctactttattgttttcagaaagtggctgactgaccggcaaaatcagtttagttgcccaatctgaaagctcataatcacaacaaaattcattcgaaccggcaaattgctcaccaaaatatgttaaaagatattctcttttacaaccgtcctctttgatataagcaaccatttcttgcaattctttttctgtttgaattttgcgccgctcaaacatcgtaattatttgctgcggcgtaaaagaatgttcaagataaaacgcaaataaagacgcttgctcccccaaaacacttgctgacaacttgccattcttaatctgctctaaaattgtaactggcggaagatcaacgcttgttaattgtcgttgaatcatttcatcgccatttgcatatagaagaactgccaaactctgcttaccatcacgcccagctcgaccgatttcctgtaaataattctctaaattacttggcaaatgataatgaataacgtaacgaatatcatttttgtcaattcccatcccaaacgcactcgttgcacaaattacctgtaattcattattcataaattgattttgaattcgaaatcgttcaattggagcaacgccagcatgataagccgccacatttaaatcagtttggttttcaagccattctgccatctgagaagccagcttacgacttgcaaagtaaataatcccgggaccagtgaatttttgaactagtttcagaagttcaccatccttttccttttgagtagcgatggacttaacagctaaaaaaatgttaggacggtcaacagatttaattacctggtaggcagtcgtcatccccatttttttcaaaatgtcctgtcgaatacgaggagtagcagttgccgttaacagcaatgttgtcggcgatcctaattgctgccgcacttcctttagtaataaatattcaggacgaaaatcagggccccactgtgagatacaatgggcctcatcaataaccattaacgcaatcttatttttcttaagcgcggttaaaacttgctggttatcaagcatttccggagaagtaaatataaatttaaatgatttcaaattgtggaggacgcttgctcgctcttttccgacaagctggccgcttaacataatgactcgtttttctccctgccgatgaagacggtcaacctgatcctgcattagtgaaatcaacggtgaaacaatgaggatcgttcctgacaataaataagctggcaattgatataaaagggatttcccggcaccagtgggaagaatcgataaagtgtctttcccttccagtaaggcgttaattgtctcttcttggcctggacgaaaatcctcaaagccaaaatgattttgtaaaacatctagaatttcttgcttatttttcatttgttattccttgaaatatttgatataggcggtattcataaaaactggcaatttgctcgtcaaatttccatgcggtcggttcgcccttatagaatcgactaagttcgtcacgcttactctctggcaaaaggatatcccaatctagcttgtcaggaataaggattgccgcttccaagagatgctccctaattgtattttctttcaaccgtcgctcttgagcaatcagttcaattggctctccctgggtatataagtcaaacgttacttgggcactccggtttagtggactctcattgatcagcggaaggagcaattgttgcagtggaccaggaaaattacgagcataagcgctaaccgctaacatctcgtcatgacgtaagtactggatatcatcgatttttattttcaattcttgagctgcttgattaattgtccatcctgatcgctgataaccaatcatgatattaaaaaggtccgttgtcattcgtggatcttcactttccaaagcgctgccaaaccgatggagatcagtatagagatttttaaccagatcgtgatgataattttgtcgaaaccactgcttcaccgcaaccatttcaccatatgaaatcgccaatggaacatactttctttgatgataagagaattctgatacgacttgaatagctaaaaaaagtcgttggattattcgttgcgtattggttaaccagtaccagtcgtaaaacgatgggatgtagaaagtttcttcttcgttttttaaaactttcgcgccctcttctgtaagaattgcttgggattgatcatcaatcgctaatagtttatcagcaacaagttgattaataagctgatcatattcttgtcgattcagtgttcgatctgcccctaaccactctaagattccatactgtcgagcccaaaagagagttgcgactgttcgccgacttcgcagagtgttttcaattacacgaattcgccgtggctggtgatagctaaaaaagcgcaataatttattcacggatttcacccccctatatatttatatacgtaatttatttaaaaattctaccataaaaataaaaggccaagaaaaatctcagcctcttaatctatctttttaaatcattctatgctggtctagccatggactcaaccgacccgcgataattacatatacaattgtaacaaccaaacccttaataaggttaaaaggcaacacaccgatcgctactaattgagatacgggcaaagttgacttccagttccaaactgccatatataaaggggtaaggatccacaaattaagcagagacattaaaacagtcaacgttacggttcctaaagcaattccgataatagcttgtcttttattactccagttatgatgacgccatacccagcagaacggaagcagaagagcgagggatgaaataaagtcgctggtaaccccgattaattcagctggcgaaaagccatgaatcattccgtgaattaagcatttaattgcagcgataataattccgccaactggcccatagatatagccccctagcaaaacagggacatcagaaaagtccagtttaagatagggcgccatcggcaaaaccggaaactcaaaaaacattaaaataaatgctaaggcacctaaacaggctatgcctaccaatcgttgaatacgttgatgcgttactgtcattaataacaacctccatctgagattgtctccatttggcatcctgtattaaaaaagcgttgccgacttaccatttgtttgtcagcaacgcaaataaactatttaaagattatttaatacagaaatcttctttataccagactgtactgtcggctctggaattacaccagatcaaccattaacaatgggttgcgggctgtcaccgccggtcgggaatttcaccacgccttgaagacaaacgttttatatttttacaagtcctattctaataggcttttactgtcatgtcaacgtttatagcttggatctttttccatgttattccgcagtcttccatgacttttcatattttttgctatatttttgctatatatagcaaaaaattttggggttctcagaacatccaatcgaactttattttagatgttagtttctactattatatagtatctaaaaataaactatataccaaaacccttttaaaagaaattaattaataaattttgataaattatcaagatttattttttgttcatcaatttttctatatagaattttccggcccattaaactaaaataaacacgatataaatattctgttttgtttttcttaacaaactgtaatttaactttacttaagcttattctttcatttaaaaataaattcaaatgcattgacggagcattttttagaagttctatttctcctcctgggcatataccgttatatggttttctagcttctactccacaaccagtcctatgtttcataccctgcgcatcaacaatccaaccatcataatttagaggagttagacttgcgttgcataccgttattgtccacttttttaaaacaatattatagttaataacatatgatacgttaatttgttttttacgaagtccaagatacaatgctacaatcgctgaaaagactgtgcctattgcgctaaaccaatccgctagatttcccgtctccatccttttttctcctattatgcgttatattttacttaattaaacaaaaagcgccctgttaagcactcattataaaaaacaattataacaaaataagccctagggatcattacaaaaaaaatggtaacaatctctagggctaaattattattgacgttgtgagtaaacaactgaattgagttgttgctgattgacgccattagcaatgtcattagcaaattggttatagctaataccccaacttgctaagtatccgtatggatcaacatgtgagccaccaatattttcggttacccagttatgggtcttaacaccgggagttcctgcaccaccagcatcaagagttagcggaataccatattgcttagcgtagtaacgagcaacattgatgtaagcagtgtaatccttaatgaattggctacggttgtatgttcgccctaattcaatctgacacggactgtatggattagcatttaaagcaccccaagaaacataacccggttcaccgacttcaaagacttgaccaccatcgccgacaacaaattgggtataagctgattcccagttgttgtgaagatagttagcattggcagcggcacctgattcagcgccgacatcgtgcatgatgatgtagtcgttgatagctgattgactacttccctcccagctggcgaggtcgtaggtatgattgatttgtgatggtgtaaaggcattagtattttcagaagtcaaaacaccttgactatcagcgtgatacttcacgccgttaaccgtaatatcttgattagttactaaggcaccatcgcttccgaagtaataggtgttaccccagttttggtagaactggttagtatatcgcgctccatcagcgccaaaataataagtatgaccccaattgttatagaagcgattattccagcgagcaccgtcagaaccaaagtagtaagttcgtccccagttagtataaaactgattggtataacgcttgccatctttaccgaaatagtaggtattaccccagttgttatagaaatagttgcttacttgattaccattggcatcgtagtagtaagtcgctccgttccgggtatcgaaaccattgcggaccatttctccacctttaccaaagtaataagtgttaccatcaatcttttgtgctttattagttaatcggtaaccgtctttattgaagtaataaagattaccgtacttatacaaccaattatctttcaattgatgaccatcagcatttttccaagttaccgttgagccagcgtcattagcactattagcctctacggtagtagttgcacccactaaaaaagcactagcaatggttgccagtgctaagttcttagctttcttaagtgatttatttttcattattttttaccctccttggtagattgattaggaataaaactcttgccactaaagatagtcttgtctgtattcaatttaatggaaccgttagaaatagttgtctttacaccatcaactccaatttcaacagtactggtggttacttccccgttgccttcaacaaaaccacaaagccccagaatggttaggatcgtgttaatgatcgccgctacttggtcccagtggccatacgtaaagccaaaagccatcatgacttgttgaatgagcacaattaacagcgtaataaaagacgctacaaccgttttattgatcgtaccgtctggattaaaaaacttctttttaagcatttgttttaaattcatttatgactacctctttccaagtttgtaattcgacgctcgtgatctttcaattgctcgtcgtgatgaatgaacttcttgtctcctgcttgcaggcgttcattggctctttcatattgacgattagagacttccatattcttgttgagtttacttaactcatcataaattgggccaagaatatttttctcaatattatcaatggctttctttgaacgtttgcttagccatttaaatccggtaatgattatcccaatgatggttagaatggctacccaatcctctagcgagtagccgaaaatatagtgaattgctacccagtgcatttactcacctccattattgagcggcgctacttgccgacgtatcagaggtacttgctgaacttgcgctagtagctgggtcagcagaggttggagtatccgacttagtaggctcgcttgttgctggcttattacttgctggtgtattgctcttagcaggagtcgtaggtttgccagcctcttgaagttctttaaccgcagtttgtaaagcagtaatttgtgatttaatctcatctaaattcgttgaattttgcaaggtgttaacttgatctttcaagttgctaagatcttctgaattcttgttagcagaatcctgtaaagcctttaattcagttgagttatcgctggcagtttgtcgaagagcattaaattgttcaacagtgacaaatttagatgcatcagcgtccttccctgcttgtccttctgcaataactccggtatcagtattaccaatcatccagtgcttcgtctttggatcaattgaaggcgttaaaccgtcattcccgttaaggcctggaccaccaggagttcccggaagtccttgaataccttgttctccttgcattccttgtggcaattgtaagttcagagtataggtatttggatcgctttgtaatgggactaaggttgctgatggttgagcatctggtgacaacttggttaccgagccaatcacaatcttcggggtctttccaggatcacccttagcacctttagtcaaagttcccactttttgcataaccgcattccaaaaggcattaattgtcattgatggaatgttagttacatctgataccttcattgagttttcttcaatcgtaaattgagcaaatccttttgagggatagacagcatctttctgcgtgtcgttgctcatcgcccacaattcaacaatatagttgccaggggttaattgtttaacgtcttctgttttaagaatgacattcttatcttgaatatacccggtagccgtagcggcgaagtccttagggtgttctaagtcattgtttaaggtactggcaatcttgaacgttaatgtccgattggtaaagtcgggcacttggtcatcgtccaatgcagtgaaagtcattactgcatcagtgtcaccgaacttccagtcgccccacttttcatcaatggttagatctcgcatcttatctctcctttctattttctacgtagtttcttgcccagttcatagatagcgatggcaattgcatatccgacaacgtaggaacacaaaaatgctaaaagatttgccattatttccaccttccttaccgccaggagcagagccaaccgatttgaatatattctggatcaggcttagttgcatcgtaactatttgattggtggtgcatccagatttgaccactatcaccagtgttgtaatcaaacattaaaacattattttcattctgggctgtcaaacgtgggaaagcatagataccaccattcattgccgctttatcaacattaataacttccagcccttcgtaaggcttcattggtggaaaatcaaacgttccttcaagcttgcaataaccgacatacttattgaatttgataagcgtacatttaacatcatcatgagcacggcaaccgttaactccccatgctttgaaatcgtattgcttacctgattcatcatcggccaaactagcctttgccgcattgattgcattgttagcatagtcataagcaggctgtaaggcattgccacttaatttatcaatttgagtagtcccatgaaaggtattctgccccgtaaatgtattattaccacccaatgtagcaacttgattagtttgaatggatgataagacggcgttcagagattgtcttgcaatttttgccgcatcggttgtcccgctcagcatattttgaagttgacttgtaaaagacgcaactttttgctcaatctgagctagttggttatcaacgttgccgtcatagatttgtgaatcaccttgtgtcagatagcccacaccttgaataacgctaaacataacattaatggtcgaaataacttgatcgttgttgtctttaatgcggaaataggcacgatcatagtcaccgacccgctgatagaaagcgcctggaattgtaaagtctaacgtccctaatgacgggttaaccatcgtcatagtattaccgctaatcttagtctttccagcggagtcaactcccaccaagtcaagactacgattttccatattgaacggatgaccttgttgtccgaccatcacaaacttaactactcgcccattgtcgccctgatgaccattcatttcatcaattcgggtgactttatcagaagacatggttacatcaagaaccactcggccattgcgataagcttcatcgattgttgttgccattctttcactctccttttagtacttgattaagatactgaattaaattattgagggtagtttcaatttgtccccaattatcattgaccgctttcttgtagacatcgttagttgctaactgatctactctctgtaagttcagagtcggtgtagaatcgcctgtttgtggatcaacaatccaattagcattgcaaaccttaatcacatcattgacaacactttctaattgttgaaaagacgccaacacataattacgtaagcttcttgttaatgcattgcctggcattactaacgatatttgagttttttgcggatcagttcccataatcgtttcaagattgctataaagctcattaaccttaccaataacgttgtttgccccgttactcacgttagtgccaattccaaataaatcattaaggcgatcaattttaatttgatcgattaattttataactggcttatctggaacaacgggttgatccggtttgttgtctggctgattaggtttgtctggattagtaggggttgtaggattagttggcttgtcatcaggcttgcttggctcagttggtatatctttagcagttgatttaatataatcagctaatcgttgagccatctgcatttgagtatcgaagttcggatgcaaacagccatcgcctaacaccgttttataattctgtggtgtaacaattggatcttctcgccagtcgtaataatggtagccgttctcagttgcccaactcttgaatacgtccataacttggttttgtgtaattcctaactggttaggactgtcaagatttgttgcattattaatgaatgattcaatcatcagatcaactaatacataagctttactgcctgaaactgagaacatggaactgaacattgataatccagccttaagagcatctaagctttcacggttaagtccccaatcattagctccatagcccaatagaatatagtcatagtctgctaaattaactgttgagagcaaagaaaccatcgatttatcgccatcattaactgatgtggcactaacagctcgattatctacttgagcaccaattaactcaccaattttgtcaggaatagttggatctgctcttggatgagcatcaccgtatcctgtcactccccacataattgaatcacctaagcatagtaacttagccatctaattcacctacttttgttcggtatcagtagttgtcgtttccttaattgcagtatcttttgctaactttcgccgagcaattgttaccatgtcacccattgctacttgcataaatgtctttccttctggtaaatcgctagagttaacccgaattgaggcattaatatattcgcctgatgtaacttcatttccatataagccaatttgtgctgaagtgatttgtccattatcaaagttgtaagtgaagttgtttacttgtaattcattcatgattaattcctcctaaatttttgtattaaaaaggcccacagcttacttattagcttgtgggtcttgttctgtttttaaatcttgatcattttgagcaagttttgcttttgcttcgtccagttgtgattgcagactcttatttttcttaatctcatttgctaaattaacctgtaaaattgcaatatctcgttcttgattctttgaacgatcaagcaatacatcaataacatcatttgcgtttgcagttaaattatccattaatttgtacctctttttttatttcatctaattgtttctttaattcttgtactgcgcccatcaagtaaccaataacatcagcatcagatcggcctgtcctacgctcattaataaattcatcaggtgtactgtactgtgcaacatcatgcacatcatcaataattggaccagcatggcgtttagtcatgcctccggctacttctgccttatattggtaagtttctagatcagtttccatgatcttgtttagagcatccttagtatcaagcttttcaattcttgttttactggaaagagtcgattttgtggtccatcccatgccttcaacgtatccattgaaacttgcccacccaaagactcggaggtgaaccccagttgcattaccagtatcattaggattaccgatattaacttcaccgttatgcatataaatctgttgattaccaccttcaatgaaagtgtgatcattaccgtgaaccgtagcataatcgtttccacgtaattctgccttatcaggtcctaaaaataattgtgagttacccgcataaacatcaaatcggctgctagtgctaattgaaatacctttagatagattgttagaggcatttgaaccatcataaacatgaattcgatagtctttattcactccactatctgcagaaccgattgatataccacttgttgtcccgtctttaagatacgagttcatcaaactgtaactagtagaagcataaaatccagaatactgatctgttggactattagggttcgccataccatttgactttacagccagccgaacagtatcatcgtgcattgttagaattgaccccagctggttagaagaatgaatctcaaaaccaccttggtattgaagattgatagtgctctttatcttgtcctgatcatattgagcaataccggcgccaatagtcgcacgtgagccatttccatagaacgtcagcttatcagcatcaagttctgaaatagcggcactcggaataaaagcacgaccggaaaatacgactgatgaagcatcaaggtatagcttatttgactgaatcaacgtattgccagcagtcaaattaatttgagataacaagtcaccgctcttgacccgcaggttgatgtcgtcacgaagctgggtgatctcactctcggttgcaccctgcgaccatgcggaccatttacttccgtcgtactgacgactgtaatgcagattgtcacggtcagacacggcgtactggacgattcggctgtcatagccgggttcaacctgcacataccaccaataaccaccgggtggcagatttgatccgcctttgacgaaaatcttctgctgggtaacgacattgttcaaatcgacgctatccgtgctcttccataaagtcttgtccttcaagtcattaattgcaatctgggcatcgcctatcttactttggaaggtgtttgaaagctgggtaagcttactcgacgtatcgctttttagattagtaacgttgccttgaataccgtcgatgcttacttgaagattgctgatttgagtaacggttgctaaatcagacggagccggtgaccacggagttgcaacggaaccacgctccaacttaggacgccagaatgaaaatagcgttttggctgaagctctgaagaacacttgtacataatggcaatctttctgtgtatgaatcgtctgagtgtttttcgacctatcatcggtattagcaactactcgcatatggtcaagatagtgaggtgtcgtattattttgatccttgtattccacaatgaaagtatagatattattgtagctgccaccgcttgctaccgtgttgtaataagtttcaaaagagagcgtatagtcagtatctggttctacgggaagaaactgcgtagcgtctaagtcaccgttccccttcagctggtctaactgcattgcttttccatcacgaagagtaaagtttgacccccacacatctttaagtttagttagatcagtgctgctgaaatctgtagcttttagcaggttgataccgccaccgttattgctcttgatcttagtgtcaagatcggtagcagtgacattccactgatccttggtctgcttaaccagcgtctgggcatacgacatcgttgcatagcccttactatccaagatgttgttaacggtagtgccatcaaccttctgcttgatctcgttagccatgacatcaatccgtgagctgttctgtgaagccgtacccttaaccttgtcaacttcagtctggtcggcttttaagctaatctgcttgttggtctggtcaatggcggttgagtttttcttaattgaagcgatagcatcatcaggattgggggaataatcagattcaatattccctaactctaattgcggatgatggtaagttgtagtaaagttttttccttctatatttcccatatgtccggcgtacaaccaaacgctatagctcactccatctttaggaatcgtaaatgttgttgagtgtcgtcgaccatctgctgggaagactaaactaccaggtgcttctttatcaagagctgagttccaaatccgtattgaggcttctttgaccccattggtatttgtagcagaaacagaaaaagtatatgtttcaccaggagttaaatcccgataaatcacccgattacaccatgccggccgcgcatccgttgttttagactcaataacaatatctgttccgctatttggtattaaatttcgtccaccaatccttaacccattaaccttatccttcaacgtctggtactcaacagatgacaccttttgactaatctgatcagccattaccttttgttcggcgctgactttgctaacagttccctttacattatctacttcggacttgtcagctttacgcaacaacatatctttagtttgcagctgctcggtactcaaagaagcttgcttagtttttaagtcgccagttataccggaatacttactatcgaagttatttaccgtaatgttaagagtagctaattgattaccttgaccagtcaacgtatcatgaatgcctttagcgtcaatctgaatattttgaatattcttttgagcgtcactgagtaataattgcaaagaatctgccttttgcgtgaccttatcaatattgccttttgtatcagtcaattcgctggtatgttcagtagcggtttgctcaactttgcttaatcgaccatcgtgatctttaaactcactaactaacgaagtagatgttttttgcagactggaaatattccccttggcgtctgccatgtcatctttcaacgttttactgtcagcttgcaaggtatggatattcttgtcatgatcagcaattgtcaatttgatgccactaacatctttttgcagagcagcaatatcaccttgggcgttagataattgttctagtgtccctttggcatcttgcttgatctggtcaatatttccctgagcgtctttcaacgtagtaacaagattatcagcagtctgtttaacctgtgttaagttgccttgcagatcagataaagtagtcgactgttcagaagcggtttgttcaaccttacttagtcgtccgtttgcatcttccagtgtagagctgagttcctttgctgttgcggttagttgtgcaatatccttactatgatcagtcaaagtagcgttcaattgatcagcttgtgcttttacgcttgcaatattgccctgcgcatcttttagcccagccgacaagccatctactgtatcagatacctttgtaacgtcgcccttaacatcagcaattgtaatagaaaaaccatcctgattatcttggatggttttaatcgttttgccctgttcttgggcttctttggaataggtatctaattgtttagcaagatcgtcattagcctgttgagcagttacaatgtcttgacgactttgggcaatatcactattaatcttagtaacactgtcattaattagcttttgattctgctcaacagcggactgtgctttagttaagctatcatgaacattatctaggtccttttgcgctaaaccaatatcacttttaagcttatctacactagccgagttagcagcctttgccgtatcaacttcattttggacttgcgcaacgtctgctctaatttgtgcaacatcgctagctgcattagctttcaattgctgaatttccgccgtagcactatccattgcggactttgcttcaaccaccgctgaactctgtgcaacaatcgcatcactattgaccttacttgcagcgatggcggattcagcaaatttcacagcctcatcggcttgtttgcggacgtttggtaagtcggccgtagcagatttgatttcatctgctactttatgagccatattaggccacattctttcaccatcgtctttatcatataatcgcccaaacattgtgtctgttacatgaaaggttgctccattatcatatgagtatccacgtcctaagatgccagtttttgtatctcgtccaatttctccaacaataactttaactgtttgttggttggttttgcttgttttgttgctcgacgtattgctcaattcggtctgcctcctcccttgtaatagttagaatatttgttgactgatccggataagatggtgcttgtttaatcgaatcaatagccttcatcaaactcttattacgggcattttgataatctaaaatgttttgtgtatttgagttcaatgtaactgaggttggattacttacactaaacggataccagttaaaaccaacaactgcttcattagtggaaatttgttggtctcttactattatgtgaatcatatcgccagctattggcttgaaatttgtataagtagttacgtcaacagataatgccggattaggttgaatttttgtttttgcatattcaatcatggcatttttatcactaaaacgaccgtcttcaatcggctctgctggaaactctccatactttttaattgattcttcatcacgatacataaatggcgcaaagtaataatactcaatggatgatgaagtactgctactttggttactactatctcctgccgagccaccgctaccaacaatggtcgccatttgatcattgcgggcaacccagcttggataaaaccaactagcaggttcttccttacaaacttcaccaggttgtggttcgaagataatagtatttgcatctaaaaacaaggaaatatggtaagaacttccatgagcgccataaaaaccaacatctccagtttgcggagaactcacttcatgaaaatatggttccatagcgacagtctgagcaggcacatgaataccaaaatcttgataaacctgtgatatataagaagaacaatccattccattacgtggattacctcctcgtgcaccacctgcaccaccatacacgtatggaacacccaagtaagaacgcgcgtcatcaataacaccttgtgcacttttagtaacgtttgccgctggttgatcaccgtcactgtctgtatcagtatcaacttcggtttcaattgaatacttaccaccaatacacataacttcattcgttaagctagtagaatcaaacgtccacttaaactcggtagtgttataaagataatcaagtcgatttccgtaatctttattgaactgatcttgggtgtaaacccgaatgtttttattgtctgggtaaataatcgcattaggccagtgatcagtaattttgcttagcatatccgacccactaccatcactaagttgctctatacgtgacgatggaaaatcaccaataacttgatatgaaaacccaagattgttgccgtctagccaatatttcaaaacatcatcgattttgtaagaaatttgattttcgtcagagtcatctttggtttcatcggtcttggtaacagtcgttgtggtggtagtatcgccattttttgattgagatgaagttttttgtgcattagaatcactatcatcactgctatcgtcattgccattatctacttgtgttccaccgttaactcttacatctgtttgcttatcattatcttgtgggtccacataagtcttatacttgcgaattcgtccaacttcaaaataaacatgagtagctaccacatctaacgagttttgtccagagttagcgtctggttctgcttgtttgatgatatattcttgaccatcaaaaaagacggacgcttgactatccaacattgaataggccaaggagccgtcttgataagcagtaaattgtaaactccaagttgaattaacttcccatgtaatgtaaaagctatctggatcaacacaattaagaggttcaatttcggtgcgtccttgtcctcttactgttattttttgagtaattccaggtctcatagataaataaaaggaaaactgaaagtaatatctatgctgttggcaccggtaacagcaatattattccagccagtatctaaaataaggtttccgtaatcagtattagcacttgctggttgtccattaagtgttgtgttaattccattaagaattattgtttctgatccatttgaggatttttgatattcccactcacttccgttagttgaatttgtaattttcatcgaatttccattaaagtgacaaacgacttgtaagtcatgcttttgtccatacggatcaattgcaatatcacttggattaaaaacttgaaaactactggtagtaaagtgataaacaggagcatggtctaaccccaattctccaaattgaacagagcccgaagaaaagtcatataaagagttgctacgatataacgaatagcgatatcctgatggattgtcaaagttcattgtaattaacgcatcatgagcataatcttgactaggctttatttcgggtaaattggggtaaacaaaacggacaatggaagattccacgtccgttctcattctaattaatttacgttgcccgaagattcgataaaattgatgtttagcaagtttgaagtcttgccaatcagaaaatctcaaaaagaaatttgcaacaatctggtatcgagaaaatgttgaatattgaaattgacttccatctactccagcaatatcaagaaatgaattattaattactggagttgaattatctcctagatatcttaggccttgaaccttatcagcaatattaaattcatttccatcaccaatttttagatataattgaggattttgcaccagataatccacctcctaatagctcatataatcatttaacttctgatctttaccataactactataaaattgtgctcgtttacgccgtgcacttatattatcgctaccattagccaaaatagcatcgatttgttgtttatttaggccaacaatctgcgctaagaaagtaacagcttgtttaagataagcagtagtttcatcattagattgactttgcactcgccgactacgtaaaccaccagttccgccgctatcttgttccatcttatcaagagtatgatcaatcaaagataaagcacgcggacgtttattaacatctagcggaatgatggcttctgggagtccttcttcggcaacttcatatagtccatgtttagtggcaaaaccgccagttgcccatccatgacccataccgacgttgccccaacctccttcaccgccatgttcaagaacattaatagctgctagaatttgatcatatccgctcgcacgatttttatgtccaggcaacgcatcagcattccaggtgcttaaagcaaattgcaaaagacctagtgattcgtttccaccagagtttttatcatgtacttgctgtggaatcgttgggttaccacctgattcagtctcaatttgtttcaacaacttattaactttccattcagctgcatcatagcctaatgcatggaaagcacgaataatatatggacgccaacgtgctacgccagcaccacccggattagcctcagacgccatttgatctttcaaaacattagaaatagcttttgcaaatgcaatagcagaagctggtcctaggtcggctacaagtggaactcttgaattccagttagtcattttaaggatcaatgttttagcagcttcctctggatgtttttcaaattgctcagataacttatccatttctgattcggataatgtcccattagcatatttatgaaccccaattgaattcataaatttataagtactttcaccgctcaatacttgtgtaccgcgtggagcgtttggaatgagggtatttcgatgctggggaagtaacgcttgaccattagggaatagtacaagttctttccaatgaggacgaactgaatcattgacaagcatatgaccacccggatgtccgccgttagtaccgttagcataagaaatagtagataatttcttgtcaccaccaaagttgctgatagttgagttgataccgctaatccctttgttcaagcgactaataatatctttcattgatgattgagcatatccagggagtttatcaaatcctttacggaaattacttacaacatcatcaatccaactatcccagcctttaagaaatgaactactaaacttagaacgagtactttgaatatcatcaagatacctatctacagaacgactagcagatcctaaatttcgacttactggacgatctaatccagaccaggtacttctccaatcgcgatcaaattcacgcttaaatgaacgtaatgcacgatccattgaacgtgtttgacgattaaattcattaacaaagccagacttcttaccgctcatcgccttgttagcaatattagcctgttgagcaataagtcggccaaatggattcttacgaatggtacggtaaagattacgaatatcagaatttagcgcagtaaaacctgtcttctttccatttaaccctcttacggatttttgcaatgtattaaatgaacctgctaaagatttaagcggttttgctaatgaacgccaatatttcgccgagtttttaacactcttatccattctagttaaataagtagtaacttttgatttttttagatctccagctaacttcttaatgtaagcacctattttttgtttcttaagagcattatttagatctgtaaatcctttcttggtagcttcaagtccattctttccaactaatgttttagttgcattttgtagcgtcttaaaagattttgataatgacttaacaggtgaagcaaattctttccacttttttgtagaatcttttatttcactactaatctttttaaggggtttctccaaagaattattctttaagctcttacccagactatcaatgttttttataaggcttttaccgtactttttaacagtcccatctagtttaggtaagtcatcattaaatgctgcaaaagcatcctttttagccattgagttagtaaaccgactaaggtatttaaaagcatccccaatttccttaatcggtttagcaaccttcccccaattacttgaagcaccttttaattcagagttcatatgacgaagttcagaagttggatcattagttttaataacaccctttaaccctttcaacgttttttcatatgaacctatttgagccgtcatagcttttaagttttgtacgtcagacttagagtagcgagtgtttcctaaagacttaactttattttctgacgtcgacttatgagtgtcagtggtagaagaaactgattgtttgcgagttggcttgtgaattgtttctttctgacgatttttcccaaaccaatcgaagaatccacgccaatcatctttaactcctttaatcactgaacgagcatctctacccatatcagatttccagcgtttcacattcaatgtgcctaaatcagcaatggtatcccacatttcctttaagccagcatggacatttctagcaaagaactttaatgtagcaaatgctgtattaaatgttccacgttcccatcggaaataacctgctataactgggtgtttcttttcaattgctgcaatccaattattatattttcgcgtagcatccttaaaatcccagccaacagtagccacaaatccacgaggtttatagtttttggtataaccattccaccccttcttaaatgaatcagtagttttgtaagcccaatccgttcctaatgatgctagctgaccaccaaatggtcccgccaaataccaaccgatcccttctgccattgacttaccagcatccttataacgacttttcgcttttgaatttgttaaaccagaataaatattcttggataaatctaaggcggttaatgctaccatgccaaagtctataattgacccaaaaatacccgctttttttattaagtttggtaacgatttaaatttacttaaaaatcctgttgaagctttagcaccagctttttctccaccctttttaccaaaatcggaaagaacattagaaaaccacctagaaattctcgatgatcttgtttcgtcaaggtacggtctgatctgaacatctctttcagccttttcaattttacttgcagcgcctttttctttagaaggtatttctatagcgttgccaatagctgaatctccaccagaaaccaagttatgttctttccaaagtgcaacatttcgttcaagctcatgattttcaagcttaattttatcgttttccttattaatccggaacaaacttaaaaagtcttgtttcagagcacttaaaccattaactgttcctttaagaatcttaaaggctgtaactagaccaattactccaccggttacttctcctaagtatttaggaaagtttatgtttcgttgccttattccaagtgctttttctacattttttgtaagcagaccaattgcttctccaactgctccaattgcatggacaacaattccactaatcttaaagactgcagtaaagccttcaacaaagccaccagtaaatgaaaagattgatttagaattatgactaataacacgtgcaaaattagaaacacttttactaaagtcaccaatcgctctttgaccatcttttgagccaacccaattactcatagcctttgctacatcattaacagctggaagaagcttattgccaagattaattgcaatatcttgaatattcatcttaagctgttgcatctgcattttagtagattgcatgtttctttgtgccaactgatgaacataattggtcttttcagccttttcttccttttgaataagatcatccatcgcattagcactttgagataaaatcattgcagcattttgtcccgttgttccaaacacagctttaaaaaatgctccacgatcggctttactgagattttcagtatgcttattgataactttcataatatcaggaagctgctttaaagcacctttctttgtcttaaagtcatccatcgtcataccatactttttaagagcctctgttgcgccagcagtaggcgatagtaaactgttaagcacttttcgtaatccagtaccagcgattgatccttctaatcctgcattactcaattcacctaaagcagctgtagtagtttcaatggactgaccagattggcttgcagaagctgatacataatgcatagcctctcccatattcttaaagtctgtagccgtcatatcagctgcataggccatagcattagttactcgctttgaattttgaataacttgttcagatgttttaccttgccgtagattaaacgcatctaatacattagaaacattttgtacaacatccccataatcatctccagatgcacgagctgcctctaacatagatttcattgaaccaattgactgtcccgcagaataaccacgttttacaagctctgtgtactgatctgcaatatctttttgtgagtaaccatattctttagagaatttagcagcatcacgttgcattgtgcctacttttctaacttcactcgcagcttcacttgctgatttagcaccaaatttaagtaaatttccagtagtaacccacgattgttgtaaattagcggacatttgtactgatttaccaacagcagcaccaaatggaacaagcgccattgatgcagtcataattccaccacgtaatgattgagcccattctctcgtatgtgaagtagctcgacgcgcattggtatcaagattattcattgcacggcttagacgagaaattccgctatcagtgacgcttagttctgctcgtgaaatttcgttgattgaagttcgtaccttcaatgcttgagtaatttgctttgcatattctgaatttgcattagtaatcttttcactgagcccaactaaagcagctgcttcttttctatattcactagatgcttttccatgttcacgtacagtttgattaacttttgcttgttgctgagaatagctattacgtagtccatttactttagactgtaggcgatttgtttcactgacttctgctcgaaattggttaattaatgctccatgctgtaacttgtaggattctacttgagctttagctgtacgaaaagcatttccttgactattaactgatctaacataaccatccattactgatttaacactttgcgcttctgtacgtgtacgagctagaccagtattaaattggagaatggactttcgagactcttcaatcccttgagttaatttgttaatttgatgttgagcattttcaatctgacgagcggtactagcatacttcttttcagtttcgtcaaaagcacgttgaactttttgggcttcttccgaattagcatcagcatactttttcgtctcttcaatttgcttttcacgtgctttagaaagtttttctagttctccacgaagttctttctgtatatttttataattttcaatctgtcgctcagattgttcaatcttaaaattatatgcagaaattgaaccttcaccttgtcgaattgtttcaaatccggcacgcatttcagctttcattgcacttgcggcacttcgcatttggcgcaaactagctacaacaccacgatcttgcatatcaacggcaaatgtatacccttcaattacagacatctattttcctcctttcctcaaaattttttagaatgtaaaggcatctgagccaaccaaagttaatggatcttgcggacgatcctttcttgatttagcattttgtgctgccatcacatcgctaaatgatgatttataaaaatcactaggaagaataccgttactcatggcttcttgggccataaagtcgatatcttcggtgagattgtctaaatcaagaactaatcttcggaattttgttttgggtcttcagcacttaaagcttgcattgcttgttcttgacgcttttgcatttcacgaacacttggagtagtcataccagtaaattcgttaacagcagttgaatagaaagtaaataagtcgttgtatgacatatcttctagcttctttgcgtcatccttgctaaggtctaataacttagcaacttgcttaattacttcatcagtaattacttcgttatattcagcaaaaaggactgtttctttcttttggtcaagagcatcaattcgcttgtaaatttgcttaattccctcattgattttcttgatgtttcccattgagtccataattgtgaaatctttaccaagtacgttagttgcctttaatgttactgtttttgccattgttaaaactccttctatatttaagtctatgtattagttacgtctcactattactcgtctctgttatttctttttaagcggtagttgagctaccgtctggattaattacttcagtgggcgccccactcggttgtggggttgctattttcccacgccagctgccttctcaccatcagttcggacatcaactacttgacctccatgtaataaaggatcaagagtaccatccttacttgccgtcacaaaggtttgtccagggaagacagtatcgaaaagcttttgcttatcaaaaccatctcgtccggcacgatcaaagccgtagttctttccattaaagtaagagtaccccatggaagtgaacgttaaggtatcactttcacgagtttcagctgtatctgtgttggtttgaacgttttgcgtcgtttcagtaaagatacccattccaaaactgtaataaacatcttccaatgttaccggaacttgagaaacaatcatcaatcccgcataggtaggcttatcagagtcgacccaaataccactggaaagttgttggcgaccaagcagtttttgcttaacttccggattaattaagttagctgtaattgcaacagttggtgaagaaggtggattagaaatatctaccacttcattgttaccgttaatctttgttggtgttccagaaagcgctgaaatattagcagtttgcgcacctaagttaaggtgtgacttattggtatcaattgcgtaaacaccagcttcagaaaggcctttagttgcatctacaatggtggttccatcttcgttcttcaatgcaacgtagagcattttaagaccgatattagccattagttgtcctcctctgtaagttcgttttgtgtgtagttgaatttcaacgtattcgttatgttttttgtatctggagtcaaaacgtgaccagtgttgagataacgacggattttgtgagcatacaaaaaggactcaactgatttttcaattgagtccatatctccgacatagttaatcgggtagtaaaacataattgatattcgctttatagtcgaaagaattgtgtcatttcccacgtcacgttgaccgtcattatcttctgaaacaaccaaaattggatgtgtattatcaacgttttcttcgtcaatcatgtaggcacaaatattgtcgacaaggatatcttccaagccgtcagcattatcacttaacaagcccactattcgagcggtaggagtcattttacttgcctaccttttcatccatgatttcttttgctcgttcagccatacgtttacccatttcatggtcacgttccttaccaatgcgagcaataaagtcgtgccactcactatatttagtctttggtgccgtaccgtaaggaccaccgtattggtttcgtggcttccaaccatcattcaaaaaacgagcgatataagctttcttccctttcttagagaagccaatctcataatgcccgtcttctttaatttcatgtgttagtgtatccgccaaatgctgtgtaccgtttttatacacaacgtctcgtttgtgttgtttcaaaaacgcatccatagcgtcttcgtaaaccttatctccaaccttatttactttctttcgttcgctaagagtaaaaccttgatctactctttccaaaaatttatcaaaattatcgttaattaaaccactagccatggtcaagaacctcccgatgacaagtaattaaatcaaatccgtcagtgctcagaccgtcatcataagaaatgttatcaataacaaagatttcgtcccctttacggattttataattacttgtgatttttaagtcatgacgaacgaagaacacaacagcctctttgatatgtgcccctgctagtgttattgcttggttggcacttaacgtccataacccggcatatctactaaagtgtgggttgaaacctttgattgatttccccgtatttggattcttttttccggtgggttcgtcaataccaaattccaaacggtaacgcattctggcaacatttacgtttttaaccattgtgatcatcctcttgtgttagattgctgtcccggtcggaatctgccgctgtttcattactactctcggcgtctgcgataccagaagtatagtcatctaaccatccgtcttttttagcgatttggtagcgataatcatctttcattgaattaattaatgaatacagagccattggaacctcaaaagtttgctgttcactagtagcacttcgatggttataaagatgagaaacttcaagaataacagcggcattaaatacctcgttatcatcaaaaaaatcatcaatacgttcacctacttggccgataatatcccgtcgagctgccttaataagcatttttaacagcacattatcgctttccatatcaggttctagtcgaagagaagttttaacttggcccagatcatcatcgcttactgtattctttaataattcgattgacatatatatcaccaccttttattgctacttattaaccaatgctaataagtcaggcttacttgcagatgacgcataactaatcttatgtgcatctaagtaggccttaatttctggaatagtttgattttcagttggttttacatccccattaggattgaaagtatcagctactgccggttgtgcggaagcagctgacttatcagttgaagaactatcgcttgtagtcgagcttgatggagctgaacttgctacagcactagatgcaggtttgttttgactctcatttgtgtccccacctgttttcggcgttgatggggttgtgttcttcccatcatcaccggatggggaagctattttgacgcttgtacgtcagcaatacggaatgcgcttgaaagcttaatttggtgatccatccatgcagttaagacaaacttttcaataccagtgtcaacgtccttgtcttggtcatagatagtattgatatcgtagttgtattgtgagtatgagaagtcacctacaactggcttagtagctgcatcagtaaatactactggcttacccaaaacagctgatggttgtgcaccgtataaagtgttagaaccgttagcaagagtcttaatgatcttcaagtaatctttgtatgccatcacaatagttgcattttcacggtaatcttcgtgaagatcagcaaccgcattagtaatcgcatcgtaaagatcagaaccagttaccttcttgataccaacagtgtcatcgtagaatgacatgtgcttttcattagctttaattgggttaacagcaaaggctacgttacgttccttccgagttacaccattagtaagttcttgttctacgtaagctgttaagttagcgtctgagccaagtaatacagtttcagaaagtccaaccttaactttgaacttgttacgggtaaattgaacagtgtcacccttagcttgaatttccttagcggtgtcaccatctgcaataaatccatcatcatctaaagtgaatgagagacgaggaatttctagattagtaatttgagtaacggttgaaatatcacgtaatggattatgttcttgtggtcccgtaataatatcggttgaaacagtcttaggtaagaacttattaccaccagttgaatcatcatcacctaaagcttggtacacagatgctggtacagcttgctttgccatagtattacgaaccaattgagcaaatgccttcgcacgcttttccttttcagataattgacttggttcactattaggttttaacttcttcttagcctctgcttctgccttttccatttgcttacgagcaacctcataacgttcttgggcagaatcaacgaccttttgttgagccttaatatcttccgttggagtttgcgggttagcaagcatttcgtttaatttttcattggcttggcgaacttcatcccccatatccatggcgtttttcttaatttggtaaaaattcatgtatttgttcctccttcattgtttgcaattcgttattaattgcctttaagttgttctggtatcgttcaagaagttgcttacgaaatacttcatcgtcttcttgaacctttgcttgttgtttttgaaccgaagcttgaataagctgttcagggacgtgccgataacgttgagcaaaatttttgctaatcgaagcagcagccttattaggctcaataacttcggttgcaagcccgtattcaacggcttctttagctgttaaccacgtctcatcatccattaattgacgtaaagtggcttcatcgagcttgtcacctgctgtatcgagatacgtttgaatacttgattcagtgatcttgtcgagatcatctgcttgcttgcgtaattcagaagcgtttccgactgccatcgtccaagggttatgaatcattaacattgaatttgagggcataaaaatagcgtcaccgctcattgcgataacgcttgctattgacgccgctaaaccatctacatagacgtttatgtgcgctttattctgtttcaacatgttataaatagcgattccttcaaaaacagaaccacctggcgaattaatatgtaaattaattgtctttacatcacccagatcttttaatgcatcccgaaaacctgccgcagaggtatcagtgtcgtaatattcgtcagttacgatttcgccgtcgatatacattgacgctgttttctgcttgctttcctgctttactgtcagatatttgggaatcactgttgtctgtggcatcattgtcacctcctttcaaagtactttttttgctgttacgatctgcaatatccgtatcaattgggtataaatcaccagtaatccataatttatccgcatttttagcgtctgatggtggtaattcttccaattttcgtaaatcgttagcagatgcgatcccattccggatcagcgtttggtagaacgctgtccgtgaagaggtatcaccacgaagcaaaccgttaatattgaacttgaaatagattccttgagatcgttccatattactaagcaatttacggttaaactccgattcgtattgcgtcacaattggaattaacgtcatttcaacaaattgcagcatgacttgttcatttgactttccgttgccactctccagtgattcattcaaaaatgataagggtacattaaaggcagtcgctacccttgaacgagtgattgagttcgttgttgatagatcacttggttggaagttactatcaaaacgattgatctcaaaccctttttcttggacgactgccccaccgttttctgtaatcattcgtctaaaatcattaattaacgcttgtcgattatcaggactaaccgaacgatcatattgaatgatatatgcatcttttttatccatttcgtttaacgagaagtcttcaactgcttttttgaactttaatggtccttttaacacatccaatggcgaaataccaagtgtccccgttaatggggtaatgtgtttgacgtgaataatatcggtattaaagactaagaaatggtactctgtgctgttaacgtcataccaaatagaattgtcatcaacatttcgtttaacagtaattgcacccggatcaattggccacaaattaattggggcaccattatcgtcacgttcaatccatgcataagcattcccgtccgtattccgcgatacttctaattgattaatgagttggaatgctgacatcgaaggattagcttcaccatgcaataaatcagatgcaggagtgttgatttggtcgtattccttgtattcatggatcggcaaacttgataacgtgttagctaaacgactaataactccaaagacttcttcattattgcgcaatatattgttatgagttccaaaaaagttactgttagcccagttactaaaatgaaagccttgcccttcccaatcaccagaacttgccttttgctgtggatcagtcgaaaataaatgttttacgttattccaaaatcccatatttgcacctcctttccgctaattcagttaacttacttttccctcatcattgcaactaaggcataaataccaataattgcaaataccattagcaaaaataaaaaccatagtccaagaacaataatcaaaggtgtaaaaatcactaaccatgagcaagtgactagcccagctaactttgcactaaataaaaaagccgttaaagcaacggcaaaccatactaataatttcatttcttcacctacttgaatgaaataaacgttgagaccggaccgtcataagttggttctactaacatatcaatcactgatacatgcgcatctagtgctgccgcaaatccatcaatttttcgtgattgtgatgtttttgtaggcaaccaattatcattacgatcttggcggagatggacattatttaggtaccacttaaacatcgattgttcattaaatacgaccttcccgtctaaaagaagttctttgaaattctggagcggtcctcccaaagttttaaagccttgtcgagctacctctgtattaaaaccagcttcaatcagttctttattaagccgaatagccttagcataatcgtatcgaattattacgatgttgtatttttccgattgttccttgaaccaatcaagcacgtatgaataatcgacatagtctccaggaataattgtaatatccccatcttgttcccacttcctaattcgttctggattcttatcacgttcataccgagcatgtggaatccacgaatgttccaatataaaaacgccaccatcatctaaaggaaattctaagcatgcggaggtgaagtcctcagtatctgatagatcatatccacctacgcattcacgacctaaaagttccttcaaatcaaggtgacgcttatttttttgtagtatttcaggagttatgaagcttaactcatcaacttccgagaaaatattgaattgtttagtaatccaatcagctaattcgttagggactcgccgattctttttgaaatcagtgattagtccagcaatatccatcatacagatgttgggatttgccttgacccatagcgaaggatcattcatttcttctttctcgtctagcgatgcgagataataaaatgttcgctcatcaatgtctgaatcataatttttaagggtatcgtggccctgatcaatcatatccactaatgggccatctaaaacatacccagctgtcgtaatatagacgattaacggttgcttccgggtaccacgtgaccgtttcatgacgttaattaaagaataatcttcatattcatgaatttcatcaaacaccccaaaatgaagattttccccatctttgttattcttttcagctgacattgcaacaatcttactgttagtttcaggaaagcgaatttcagagcgattaggaacaaattttttcgataaccaaggcgatgcagtaatcatgttacgggcttcttcgtacaaaatacttgcttgtttttgtgagttagctaaaaagtaaacattcgcaccgttttcatggtcaaaaccagccatgtagtctgcaattcctgattccaaagtggttttcccattcttccgaccaaggaaaactagggcttcacggtatcttcgcaagccagtgtttttatcaacccaaccaaagattgagccgacaaagaaatgctgccaaggttgcaaaactaatcgcttgtaatcaccttttgatggcttacatttcttttcaatgaatcggattgggcgccacgctttttcttcatcgaaagcccaaggatagtcaggatcttcttgcgaacgttttaagtcttttagatgacgttcacaggctaattttacccactttccggtagtgatatcgccatttaccactaattcagcatagatagtggttaaaagaataggggctggttgttccaatacgtgtcccaggtccttttcgtgttgaacgtactcttttgaccattcaacaacaccagaataattaaggcctagcggattttcttttagaatattagaactcatcgtcatcttcttcattttgattatctgtcatgttaatagctaatgatgctcgggccgcaggattaagtccgaggttcttcgctagcttatccagttctgccgaaatttgcagtttcagtcgtaaatctggattaggtttgccttctacgaatcgaccatttcgttttagccgtgcattacacgatttgtattctttcgttaagtcacaataacgtgcaatttcgtcaatatcagcctcgttcatcaaatcagtatccttgaatagcttaataattgctcggaactgttttttggctccaggatcaagataagatggtggatccatatgttcagcagaaacttttaatttttgctcatttttcgcacgccgttctaactcatcttttggcttatgattgtagttaccatttgcaactaattgaagaacatttttagctgtttgtggcatatcaaaacttcctcctttcaccgaaatttagcgcttgacgctatttttagttatgttatgatttagttgaaatatgagtggtcaaaattaacggacatccggtgatgggtgtccgcttttttgtgtgcaaaaaattttgaaaaacgagttttttacgaagtaaggcatggcatcgctccagtgattttaaaattttctattttttaggggtggggggcttgtttttgcactttttgcacacgaaaattatttatttttactttcagaccgctttaatcgttgctgtgacggcgtttataggcatgtgcgcttttgggttaaagctccggattggctttgaatgtaaaaatatcactgttcttttcggcttttagtttggtctgcttatcgtgtagcgactttgtacgttcgttgtgttcggcattgtggcaagctttgcagatagtctctaagttgttagggtctagccgtttgctatagtcaacccttaccgctttaatatggtgtactgttgtagctggtgttattcgccccgctcgcttgcacacctgacacaaataattatcacgctgtaacacttgttgtcttactgcttgccattctttcgaatgataaaatgcgttgtaattatctttatatttgtgttccatctactccccttctaacgctttaattaagttattaatcttttctgttaacttgctactgtattgccttatacgtcatcacatcgcaatataaagcaagccaaaataaaaaggcgctaccgtttgaggtaacaccttattaattcgtttctttcgacaatatcaatataacactaaaagcccctttatttttccgcattttttccgcgaggatttaaaacaaaaaagccacctacctaattaatagatagatggcatatataaataatagtattctattgcttgtttagttcttctcgtctgatatgtataagcttctccagttcgtcaagtccttcattatctgcatactgtttaatatatcgccgtgcatatgatcgcgcttgatatgcttttgctgcttccgggtgctttgctttatatttggccgttgcctttgcttgtgcttttgtaattgccatacttgcacaacctcccgcaaataatatataatatatatgtattcaaaaagggcaagcgttgcaccgcccaccccttttgctgacccaatatcaggaagccgttttattaggtgttagccgtaaaggttaacgccttttttgttggtcacggtatatctgatataatactaaacattcatctagtatcaatttcagatatgcgatccagtcgccggagctcacggcgcccgccctcctgaaattaggacttcagcaagtgaactattggccattagtttcacccgcctagaattccgcaacgctttctacttttcccaatatcagatctgtgttaattggccgttgctccgtaccactcaacaactatattatataacatatacatagaaagtaaatacattttaataaattagttcaaataaaaaagtcgcccgattaggcggcttcttttgtttctgtgtgcttgttgttgtcatccccgacaactatttttatattaactcccagcccgttcaaacggtcaacggttgaagctaacaacttcatcagtacacttttataatcgtcacggcttgcaaagtaacggcgcttgtagtcatctccaggatcaacaaacttcaaagcgtgactcttaacagtccgataatatgttttatagttcattgtatgcatccccttagtactttagtaggtaattaattgcgttgttaagtattgcttgttgtgcttgcttgttttcgccgttgtgaatgctttgagctagttcttcaaatagtatccccattatttgaactgttttaggttctaacccttcacagtaaccaccaacaaaacgggcgtatatctttgttgctgttattctgtttattgacggcgttaaattacagcaaagaacaaaccgccaatagttccgcctgaatgctcggcgctcgtgtgtatatacggcgtcactttcatataaagccctcataattcgcgtggcttccatcaagtaaagtcttactttatcatctgtatctaatagcgttaatgctttaattgttaaatctgagtaacttaactttgtaatatccatcatgttcaaccccttttataacttcccttctagttggctgtagttgtgcgcttgtccgtttttggaacatttacaatttctaacccttgcgcgccgtcccttgctgtgcgatcattttttcattcttcttgttcgggtaaactgttagagtataatcaccgtcgccatcgtcttcatagtcgattgtaaatttatcatttttaatttgttggccgtccttaatatgggtctgtgagtcctttaattccttgttttggtctgttaaatcgtcattagttgcactgaggtcttctacttgtgcggttgccttactcttggccgtttgttctgttctaatttggttctgtgcgtcgtgaagcttttggctgtcaacgtaccagttagcaactgcaataattaataaaatgcctaatactttaataattgaattcttattcatagtgattacctctttcgttagttgtttttctttaatatgcttttaaatagtcgtgtaagtctgttccatctgtattttctagtgcttcatgtgacgtgtgaaaattacactcacataaatactcaagaattcttttccctaatcgattgtttttgttttgcatatagaccaaacctaaaagcgcgtatctgtcggcggtaatgctccaatcatataaacaggctacttcttggattgttctatcactttctagatagttaaaaaattcttcttgttcgctgttaattttgatttccatagtatctacctcattattggttagttttcttttactgataatttatatagtttgttccaaaactcgcgatattttcgcccgcctagttgcttataggcctgatgtacagtgattttattttcttgatacaacttgatatacttttctacttttcgcattgcttacatccccttttacaaatcacaagaaatataattgtagtcgctgaaattatgttcttttgcgtattcattcatacaataaagagaatcgaactttagaccttccgcctgctttggggatgtcatttcataccccgttacattaaaaccgttgtttagtttttcgttgcaatatttacacttcatttttaagatctccttttctagccgttgtaaatttcttctagtgtttcactaaatccgctcaagtcatcattccaccaaataagaaagcttttaatttgcttactgtcgtatagcgttgtttgttcgtcatctagcttcattcttgcgactgttgcaccatccttctttaactcgtattcgtttgaatatccttctacttgatcgaatatctttttagctttgtttagtatggtttgttgttcttttgtcattgttattcttcctttcttttataacatcgtgttatatagtgaaattaaaaaattttgaacatactagatttttatctcaaatcttaaataaaccccttttctaacatcgtgttatataaacgattaaaattttatttattcgtccagttttttatcatctcatttcttttcttgttcctttcgacatctttataatataacatcgtgttatatattgcaataaaaaaattgaaattttttcaacttttttattcaagttcttttaatcgcttatctattgcgcgttttgtatctttcaaatcgccaatataatctatcctatcatctgtactattgacagctttataaactgctggggcttttttggggtctggatttatccatttgtgaacttctcttaacgacctcttatagtcattgaattctttatttcttgctctccatcgtgcgttggcttctagttgtgcttggctcgcttttgccatatatttcacctctttagcatttaatagaagtatataacaacgtgttagtgagttcaaacatatataagcacttttatagctctttcagtctttcatcaataagcccgcgtaattcttccaattcttcccgtgtagcgtcctttttaataaagttgcgcgctcttgacttcttttgattgcggtaggcttcttttttatgtgtgcggttgtattcatttacgcggtttatttgtcgctggtgtgcttcttctttagaatatttctttacttttggcattttatcgccttctttttaacccttttgcttgttgcctcaatttttgggcttctttaagtcattatccagatttaactaatcgatagctaacatatagcccaactaacagaattactatattaaatagaattttcagcatttctaaaacctttctatttttctagttccatagtataattatatatgtaaaagggaaccgcgccacgattcccaatttataagttttatttatttgttagccttttttaagcgtttagcccgcttttttaaggctttttcttttagacgttgcccttgccaataatctttatagcctttacaggctaaccgataggcgccggctattcctaaaagggcgcttactactgtaagcatagccccgaaactcctttcatatctagaatttgaaagttgggactgcttaagctagtaattagcttacacttatataatatcattatttttaagttgtcaactaataaaattaaaaagaataaaaaacttttctactatataataaatagaaatcatgttctatttattaagaacgtgacgcgctagccgtgctataaagataacgaaagccggttaaaagtagccggatattttatccagtagaacattaaaaccggataagaaaataaataaggcgatttttgaggcaaaattatgattttatacttggaaaataagccttcaaaaaagcatgctttttactagatccgaaaagcatgctttttctgcactctctagttcttaaagcatgcttttttcacttacttaaagcatgctttttcacgtcttttactttgtaattaactcttttatcacttcttgtgccgtcttattttcttttcgtgcaacttttactaacttatcatacagttttgtttcctccccaacaaacattaaagagagtcgtctttcttgttttccacaaacgtgggtataatttgtaggatcataccaataacaactttttataatgttcatatcatgggttttgaagcatgtttttgtacattctcggttaattgcttcagcttttattcgattacaatgtccacacacaagctgataattatctaagttagcaatctcttctgatggtagctctccaaaatatttaacaggtaacttatggtcaatttgtaatgacttttcagggaacctttgcccacaatatacacagtaagatccactaacctcaattaatctacgctttaagtttgtgggaggtaccaaacgaccgtatttttccttaggacgtaaattagcaaccttgccaagcttatattgagcaaccgcacgcttagcctgtggtacattaacacgacctggcttctcaataggaatgccatgatcttttaaatccattactgctcttggacctactgctgggttaatccctttttcctcaaaatcaaacttagttatagtccccttctcgattaatagatccgctgctgcccttgctcttggatataaattatcataaatatcgtgaatatattcttcaacactggaatacttagttttcatatttaacactcctttttaaaaaagtagcgctaacgttagcttataattatcgtataccagtttgcgcgacacgttcttaagaattgatgatatttagaacttgctagcaataataaatattgtttaattttctttctaccttaaagattctacaataaaagctttttctgctcttttttacacttataggcttacttgcttctccaggtgctagtaaatgccaatcaacatcatctccaatagtatgcctcatcttcttgtacactcttatttgatgccattcggagtcccatccattttacagtaacatttatattactatcattaaccacccaaaacctatattctttttctttatttccttcctgataggagtcaaattctatacttaaacttaccttaggctgtttattaaaatgatcattggctatctttagtccccaaaatgccattgctgctgcaatccaatctggtattgttcccaaccactctatcactatatcatccccaaaaaactattaggcattgctatttatataaaaaagaagctcacactcctttcttaacgtagcctatcacagcaagttgtgacttacgactactaaaaggaggtgagcttcatgtctccattcacacttttttgataataattgaaatcaagcgtcaggcaatgtctaaaggaggcgtgagcccctgcgtgtcttgcgcctcttatctacttttttatatttaaatgccttatagttgcagctctttctaaatatttcctttatatcatattagtagctatttaatttctgttctaacgcttctgttaaagtctttgaaaagttaattcctgcttcttctgctttttgggctaaatctccaggaattgtcgtattcttttttaccattggcgttttaacatgtttctttgcttcagctaaatcagaaaaaatcatcgtaaccaatgatccttgattttctttctgtatttcttttatatctgaaacatttggcaatttttcttcgttatataacattaatccaagcgcttctgaaccatttgccatagcctctggcactcccatgccttggcttattgctccaggaacatcagggaatgtaacagtatacatcccctttggattctctgaatcatctaaaatagcagggtatgctacaatccttttttcactcttcatacaagaattcctctctaaaatgaaatttttcaatccttacacgattataatacgcctcaatacgtattaaagcaacaaaatttacctaaaacaaacaatttattactaaaaatagtataatttttgtggatatattgattttattttcgaaatcaattttaattataaaaaaggaatgctagctggcactaacatcccttcatcttgctggcatgaattaaactacttattctttaaacctgtttgttttagaattgcgtttagtgtgcctgggtaaattgtgtcaccttttgggaatatgggactacagtcacgattccttctgcatttgcaaatttatggtgatctccattaacactaacttccttaaatccgttatcacgcaatagtttaattactttttttgcctttacctcgacaataatcaatcacctcgattctattaagacaaaggagcaggctttattattatacgcctataatgcgcattaaatccacacaaaataaaaagagactgaaaaaccagtctctttttattttagaaataataaagcaatagatcattttaagaacttaacaatagacttataggttccagaaagaataatatcatttgtattgttataacaaataacaagatgtttaccattcctgctctcaaaatagtgatgagaacctagtctatatttttcgttaaattcttcttgggctaacattcgcaaaagctctttcactttcatttgctttattttcccctctcgtaattaacagccttattatacgccttaatacgcattaaagcaaaagattttttattctaattctctttatagaaattttgtacttttagataatgattagaattagtaaacataaagttcggcaacttttccgttagcataaaatatttgaacgttatatccagctgctcgtaattgattgacaacactcatattgttttcttgtgtcaatccatcctcgtatcgaatactaaaaccttgtccctcttgcttaggagcttttaagattttattgtttatgttgtttacaaggtgttcagataattttgccttcatcattttatccaatacaaccgttttaggtataatctggttttggctcatcgttaatcacctattagtactctcattctttacagtcatttttcctgcaccattcagcccattgtttacttcggatatcacgcttttttcctgcattacccaatatttcaacagccttttttgtatcactcaaactataaaaacttgctgattcatctattctaaactcatcaacattatctatcccatcaaaatagtgtaaaacttgatacaaactgacatatttgtatacccgccatagattgtcaatcttatattgagaatagtgaatattccataatgatttacatagttgaatacgaggaaaactattccaatcatcaatcatttttgcttttgccatcgatttagtcgaacacacaatatacgtatgcatttttagccactcatccatttagtttcatctccaattcttctaagcacttttttgcctttaggtcgtgattccagtcgattaaaacatcatagtgttctgcctttacataattaccctctaactttctttttgacttactcgtcatataaatatgtttttctttcaagtacctagcaaaattttcatactcactatctggaatacctaaatagtcattaaagttaggtacaaataaatacgtatcgccccgcctatacttgcgaagaattatagatgtaaaaataaatttgaattgttccatatcttcacctcaaaaccatttgtgctttttgtgggttgtttggattgcttctataatcaattcttattgagagttatctgcgctatccagcgtaatataaaaatgaccacttccaatatctgacttataatttttctcacctaatcttctagtcaaggcaattagatatttatcctttatctgcctttcttttgatcctatttcaattccaacaaatttggctccagtagcaattccatattctaaagtttcgtttactagatcaatgatttcatctggaatttcgacattttccaattttttctttcatttcatcatgagtgaggatatctttcatttgtgcatcaccgtttcctattttattgaatatcattcaagcctaacttcttacgtcctccgttaaaccaagggcttaccgtaaatgcgagaatatcattgattacataaatagaactattaatagccatcgctagtgttgcatccccctgcgcataagtaataccccaaagaattaattggaaaattccagaagctaaccaccagaaatattggttgttgtagcgcatgaaacacataattcctgctgttaaactaatcgcaaaactaatagcgtcaatccaagggcgtgggtcattagttaacttaccaatcaaatatccagaaattacatatacaagcaatgttccaacaattgcaattaaccattgcttaccgccaaatttacgaagatgatttttagtatcatcattccacgaacgtacggctaaaatgaccggcaagtccagtgttaatacataagctacttgttcaaagattgataggtagttctttgcagacaggcctgcataaataaaacaagcagcgctaagaatcccaagaatcccgtttagagctttagcggcattgatggctagtacgcatagcacgccaagtgttgtccctataaaagtaatcagcgtaacacttgtaatctttgattggattaataaagccaattgaaaaccaaaactaaaccagaataacaaataattttgaagaggccacccctttaattgaccaagtaaccacttaaaatagttttgcttatttgttgtttgttccatttatttcattctccttttttattgttggactggtgtttagctcttatgatattcacgttagcgggcctctgatatcacaatatatttacggaagttcactggatttggttcaatgaacaacggttccctagtatctttaacgactattaacgccttagcacatgcacataaaagccacttcattgcttctttataatctcctagagtcattttgcttataacgttagaagttatcttatctattcgattaaaagtaacagatttcttaaagaacggaatatcgcgagtaacaacttcccattcggtagctaaatacaaatgattatcgtgtggctttaatgatattgaaaagacaccatcactaattaatttttcaccagcatttgatattttagaaggttccatagttaatgctccacgtacacctataccactaatttttaagtattttgtatcagcgtatttatatacttggtaatcattaaaaatacctaaaagatttacacaagcacgatagttatggcattcccagaaattcattgcaaattctgtagctagcgccttattcttatccgctttattgcaccgctctttaatagttaaataacttctccgtattatcgggacaacttcttttattgtgttctttaatatactcacctgttcatcactgattgggagtttatcagtgtcagctatgattaagtcagcgtaattattaagtgaagtaacagttcttttgataatttcaccgtcatcaagatcacttttacctaaagcgattgaccttaatatattaaccaaactatcaattttttgatcttcaaattgaattttttctttcatgttctctaatttctttctttattagcctctagcagctccaataacgcatcatattttccttgttcaaattgaattctaaatgtttttgtttcaatagtatcaatatcgatatagtgcatttcctctcgtaatgaagttaggatggtaaatgaatagcctgttccctcaccttggtggtacatatgaaaactatagttagacaattccaacaaagtaaccgcttgccccgcattatacggatcagatgtgtaccattggatcggcaaataatcgtctgacctgttgtttatggcttctttcaatgattcacgacaatctaatagctttcctccaaacgaaaaatgtctaatttgttttgcattaggtaataaaaactctttattattcccactagtgttacctcctagacatcaaaaaagcgggtagcagtttttacaccgctatccgcttctatgtatggttgcccattggtttgggtagttcaccttcattggattctgttctgccacaggttcatacgggctcactaccggcagacaactccgatagctccgtatggtttacaagacctgaacacggatctattaccgtttaactttcactcgacatgagctaatattatatttttccttatagctgtaagaaaatgctcttgggctactcgtaccaacctcgttagttatattctggttgccagacttcacaagctacgatcttcttggcttcccactttggttctcatggtaaccagccatgatttactgtgggtttaatattacgatcgcctaacgggttgtgcaatgaatttcaatgttggtttctagaacaaacaaccaatcgactttctttcatcgacttcactaggtattaattagctcttttgcaaaatatatcctatcgaacatattcggcttattggtcttacgttcattctgtacaggcgaaatgtcactttcttatgcactgccttcaaccatgattaattatatcaactctgtattttattgcacgtttagacacgtcatttttcaaaaatttttgcaagttctctaaagttttgagaacaattgttaaccattgcctcgattcctttttgaaaaaccggatcggaaaacacttctacaagtaagttgtgcgtttgttgacggttcattctctctttgtacgccttagttagttcacgcttagccttacgctttttcttattcatcctgcatcccctcagctaatttaattattacgacgagaaagattcttaattaccttttgcaatgaattaatctgtttttgcaattgaataatttccgagcgatttataacttgatatgaaggcgtaatgattgaatccaatcgatagttgatcaatgttccccttttgtgggctttagttaatctccgcttcatgtaacgctttcgtttattcatagaacaactctctcctattttgaattgtagataacattgtctcagttacttgaaattcaatatcgccaagtactaaatggttacttaatacttctgtgctaaaacaagtaacatttagcctaaccttatgaccagttttatcgattaaatatattccaggacgtgttccgtagtgcgatcccttctgctttggataacggggatgtttccttttatttttcatttacttcgtcccacaatttatccaaaatgctcgtatcaatttgaaagtcaactccacgataacttgttaatggttctttataccatccttttgattcagccactttatcacggcttggcacttgtgtctttacgctgtcaatcatttgtaaagcctgcatcgctacttcgaattcaactgatgacgtcggggattgaatagtggagataacctcttcaacagtcatttgttttgccaacgcttctttttgtgattttaccatttcacttaatttatttaattcgctgtaactagccattaaaatccctcctgattatctgttttttcaaatttctccttgaattctttcgacgaataaactttagagtttccatactcatctgtaacaatccaatcaccacttgttacccaacatttttctgtacgattgttaacagaatttcttttaaatacattgtctatgtaataatttttagttatttcatatactggcacgtcttgcattacttcatgttttctcccaaacagtccctttttggcttcagaaaacacctgtacaggtcttatagcctcatgaaccattggatatttaataagaccgtatttatttacaaagtcttgatcaaattgaacggcattatattttcgaactttctcttttacgatatccattaattgacctcgactttcttaaagcgttcaaggaattttttgttagtaaccacttgacactctccctttgagttagttaatatccaatctccatcagttactaaacggtcgtcgcatgtatagtaagcatatctttcaggaaagatattagtcgtttcaataatttcttcgttttcggctaccatcggatataaggctagtgactttttagctatttcttcacgaaactgaattgctccaaaatatcttacgttttcttctttatcttgaacaatcatattctcacctattccatcccatcgttataaccgtgaacatagcctttatagtaagattttgatacctttccttgtggctttgaatgcttgtgtgactttgttctcttatcaacagagccattcttgtatccatcgttgtagcctttagtatattgatctccgcgatgtccaccaggatgcgttacaccatacatccaagttgaaaacgtatggtgagtagcgtttggagtttctgaatgattatcgttagttatggttgttgtgtgttcaccttcagtagttgtatgtgttgctgtcggatgagtagcttctgcatgtgtagctggatgtgctgccggatgcgcagtagcatgagcaactccatgtgccgcaatcgcatttactggttcagcttggttatatcccacataaaatcctactaacaccgttccaagaattaataatgttttcttcatcaataatcacctttaatctagttgcttaattgcttcgtcaaccatttcagcaattaacattgttttttcttcactcaattcttcatttacaataatcggcatgtctattgcttcatcttcccagcaaagtttaatttcaggattgataagaagtaaaactttgactccatagccgagtttgtataatgaaaccactacttctacaagcgcccgataattaacatccccattattattcatataaaagtaagtattctttttacccattcgagcagcttcttcaacagccttatcagtatttttaatagcttgatttaccatctttttcgtattagataacgctcttgcttcatctgctgtcgtcataaggtctaacgcactattcattgtcatcatctcaagctttcatttgtaaaatcttcaacatttcccacactttgtcctttaactacgcttgccttaaatttcagcttatctcctggacgaattaagttagcctttacgtaatcattagtgttaactgtataaacaatgttgcttccttgcagtgtaaacataactttatttttatctgatactacaaccgaacgatcgacagtaccctggatattcttttgcttggtgcctggcgtatttctagctgtcgcaccattattaactaaggcttgacgaaatgcgtctaatgcactggtaggattatttccactgccataaatagactgatcttgtgcatcaaggtaataatatccacgaattgcatgcgaactatctagaatagtcattacccatgttggtcgtccgttaacgttataaagaactggcatctttgccttccattgttgtgctttatagttctggttagcattttcctttgcaccagtactatccatgattccatttgcagaatagaaggttaatttacccgttcgagcattaatcattgaataccccattgccgagtccgctttgctatttgggttagtaaaatcagtaaagtaactaattgaaccatcacgattaaagattgaggttactccatcttccggtccgttattagttggtttaataacatctgtacgactaaagttccagaaaccatgcttatatttaccaaagactttgttcatttgggctgccgagtcacttgtgatcccttcatcaataaacttaggcaagttctttattgaataagtcttttgtgaaccagtctgtgcattcatcactactacatgtaattgttgataattaactcggtggctaaacgtttctgacttgtagaccgtttgtacccaataaggcgtgccatcatcatcaatttcaagctgcggtttgctcatcgtaagccactcagggttattgcgataaatttggcgatctacatcatggttaaagtaagcgcttgttgcatacttataaggttttttaatgaattttggttcagcattttgattagttgcatctactatgaaatatccagggatttcttttgctctgcgcattgcgaagaatccgttatatttcaatggaataatataaacaggtttgcccttataatattgagcttgaactgtatctggagtatcgaagtactgactgtttggaatatccgacatagacttccgtacacgattaagcactgtattaggtgctaaagcgacaggggtttcattacgcttgaatgttggtgcttcactagacttactatattgtttcgagattgattgccatgttggtttaactgacagcttagaatgaacctcaccgatgcacccaataataaagacacctgcacagacggatatgcaccctaataaaagcttcgaccctttcttatcaccgtttgagaattcatcccaagctgatagagcaattaattcataaataattccccagaaaccattactaattaagatactcaaaagattacgcgacggtaaattaatatatacccgtaaaaaggtcacacctgcaaatagcagtaataacaatccgtttaatataagccaactgttatttcttcgaccataaatgatatttactaaaaacaaaatcattggtgcaatcatgtacaccagcatcattgttcccattacttatcctcctctggttctttcaacaaatcgataaatgttgaagcggttactttacttggactcaaattaataatttcaggcgtcgttacactaaccttggtatatagctgtttgttcgcaccagtaaatgtaccttcaacctttgcggacttagtaatatcttcttttaacatttccaaatcattttggcttgaaatgatctttccgcctaagagcttaatcagatcattcaccgtaaattgttgttctacttggttctttaagatttcaagtagtagttttgtggaattatcaactccaggtacttgttgatttccataactatcaccagtgaatgcaaccttaaagccgcttttagtcggaattactagcattagtgtctttgatttatcgtcatttgatactttgctatggaatagaacggatttgtcaccaatctgggttgctactccttgttttgcatgcgtatcaacatttgcaccggtcacaaatacatcaaatttaacttcggacgaactgtaataatcattaacagttacaacaagtggatctttaattgtgtttgcagaaactttatagaattctgctgcatgaccatattgatttaagtgcgtcatatcaccagagtaagttacttctccctgataactaccattccatccataatgatgaccacccaatgacatcatatgtaaatcaagatcagcttgaggttcgtcccatgcaattcctagcgatacatttttaccttcaaaatcataggtagtcatgtatggcaactcgccgataaagtccttcgcagttgttggtacggcatactcaacaccttctggaatataaaatactttattacgccaattgccatatcgatgttttaatacatctagaaccatgttgtgtaatttttcgctacgcaaggttcgccttagctcatttacactatctttgttattcataacttttaaataggtttttccgttacgaattttgaagtaacgagctttttgtgttccatacatacgcagtaatgcattatctaatttaatgagcttataaatgggagccttaaacattgcacgttcaatatcactaaactccacatcataatccattacgtgttctaacggtgattgcttacggggttcatacattcgctttgataagtgaatagctcgattgattaaggtcttatcctcaaaatgtttccgtaacactaaatagagtttgcgataacgagtaatatgtttagcggcttcttctattccaaaactcttaacatatcgttcaaatgttttttccaataccatataattctggtcactactccaagaattacttagatgtcctagacgattgatcatgtcacgagatttaattagcaacgtactatcagttgcaaggtaaattagataacgagtaaattcatcgaaattctttggtaagagcattaattcttcacacacatgacacatatattcacgattcttgatttggtctacataatcaattgttaaatgatagccatcgataatttcagaaattaagacttgatcttcgttacttaatgcaattccgctagttagcatattcttaactttctttgctaattctgcttccgtaattgcatcaatataaacaagttcatcattaatatcgatgtgcaaaccatttagaaattctggctcatagatttcaatatcatcacgatcaattccacgtccatacgtactcatataatgggctaattgttcaaaccgcaattgcaattcactacgaccttcgacatcagaaaatcgtttatagaaggttgaatttactttctctgcatcaactccgtattcccatactgctgatttcacaacagtcttttgttgttcttgagtacgaccatctaatacatgtggattaataaagacacctttctttaacgcatccaataataaactgggttctgttgcttgcagattgctaaacttatcttctacaactgctttgaataatttaatagttgcttcttcttttctcatgttcggtctcctttcagaaaataaaaaaggcgaccttaaataaagtcaccttagtttatatatgacaacgcgaaacgtaaacatgtcttatatttgctgtataaattaataggaacgtttttctgcgttgtgtttatagatacggacggtaattcacaaaagatttgaagtcttgtttcaaataggaaccgtcttctgtatcaattattgaatacgaacagtaaataagtatttagtttaacagactaagctataggaactgttttctgtattcagaatacatattctcggaatcgaactgaggttttcacacgggggatggtgacgacttgccaattagtctaaatatgtacctaaattagggatgtacaaagctcatttgggattaactcccaattgcggtgtaaggaatcgaaccttaacaaaactgcttatgagacagtctagcttccaaagctctcaccgccataaaaactagcgaatttgctagttacattacatcaacgtttagcttctttcctaattcaactagaaaactattacgcaattcgtacgctttcgtagtgctaactgggataatttgtcgatcacataaatcaaccatccgtaacccgacattgcctttgaagtaagtttcttgaataatcttttcagtaaccacaccggattcatctaagcattcatcaattgcttgacgttccttctttaattgttgaagccaccgatcatcattaatagttattacttctcgaccaactggatcactcagtttattcagagctcgaccaccgccaacattatcgtcttgttcaggcgtaggatatttcaattcatcttctcgttgcttaatgtaactgggaagtttgggataatcacgcagtatgtcttctagcatatgttgtactgatttacgcacaacttcacctcgaagatctcttatatagtagtcaatttcatgaccaattttggtgtccggacttgaaccagaattgacgctcaccacttgagcaacaccaaaccaaagtttttatattgggagtgccactaaatagcagcaatgttaagagctggaatcgaaccagcttcatgcatatgtgttgtggttgcaagacacataagctctcaccagagaacgttaacaatagtagctgacccgtaaatgtaaactactataactgatgctggagattcatcagtaattacggggactggactcgaaccagtgaatcacggtaccaaaaaccgttgccttaccaacttggctactccgtaataacatcgtaagctaagcgaggcctctttgatctcctatacttaactcttgatgtgcctatcgtcataggctcctctattagagattattagctaacataccagcatctgtggtagtgatgatttttcccaagaggactatgctgattgatggaattgaaccaccgcaacctaccgcttcaaggtagtgctctaccttctgagctaaatcaacaaaataactacccagaaaacgcacgacagtagttagacaagttacttaatcttcattgtatgctaagttacaatttccttaagcagagcttgtgtcttcattttataacccgaggcttagctccctctttttaaggctttcgcggtgaattttttgctaggcttatatttagatagagtcctttaggcttccccttatctctacgtttattcaagtggcctccttgaccaggacatgtactttatcctcttcggcggtttagtgcttccgtcaagcctagactaacattctcggacaggattcgaacctatcatacgcagttgctaacggagcaagcggtgactaatactccgaccttccataggcaacgagaatacagagttgaattttatttcggcattacgcctataactacggctggagtcgaaccagcgaaccgacttgcaaaacggaaaagacaattcaaacaaacgatttcagtcggatatccaacatcgtagttaccaataatcgaattgaatacaattattaagatactctttttaaaaattaaggcaattttagacacgcgatttgcaaaattttttctaaaaagatcattagtcccctaaaacacataatatgtattccaataactaatactagaaacaatgcaattaccaccatcataattagccaagatgtaaatgccatcactgtacttttcattgatgtcgcctctgttttaggagttccactttctttgaggacaagctccctaggtctactaatttttcttcaatagtatccaaaacaatatttctatcttgaatcgactcaatgaaatcatactttgttccatcaatgactaacaatggacttgcatcatattatttttcccacttctcatagtgttcgattaaatcatgatagtactgtactaaactaggatcataatctatttgttcaaacgccctaccacgttttttaatcctagaaaccatcgtgtcatagtcaacctttattagcaccatcaaatctggtgcttttttataaggagaaaagttaggatattcttccatcatggtgttcagtaaatccttatatactttccactcttcctctgttgcgtgtccctgctcaacattcatcctcataaaaatttcgtcttcatagattgagcgatccaggatattattatcctcttgtacggcttgtttaagcatatcgaagcgtttacttacataataaatttgtaattcaaaggcatacggatttgtttcccatttgccttcttcaaccattttatttccgtgataaaacataggtaaaatcgggttgttttgtactggttcatagaacgcctttgtccctaattcttgcgatagaatttcggttattgaactcttaccactacctatcacaccactaattgtaataattataatcaacccctactttcattattgtctaaacgtacatatttattcacgccatgttcatcaagagttaaatgccatttctgacgtttaatctcttttctaatttgccacgctcgtaataatgcatcgtcttttaaatcggctaattctagcacctgttcgaaagcaattcgccgttgctcatagttatcgttgtagtgattgcaatcattaataaatgcgttctcggcgatacagacatcacgatacatattcagaattttctcaatggcaacgctgttaatttttggctgtttctcatccataatttattctcgctttcttggggtttaagttttcaacactccactcccaattgtggcgagtaattaatctaacagctttaataggaacatttttactccgagcccattcacacatagcaatttctatttcatgtgtcatcccattttctttttgatcataatacatttctaaaaaatgcattgccgattcaatccaaggaagatttcttccagcgataaaatcgttaagtgtattaagtgcatcgcttcgttctaatgaaacgcgataaattatctttagggtttgactattaggaatttcaatcattcctagaatttctttatccttagcagtgagccggttttcttcacgtcttactgctagttcatacatttggcgagcaacttttaattccaacttgacaccccacattcgttacccgttgtttgtaaccttatatttctaaatcaccaaaagaaacattagtaattgttcgttcgtctaatgtcaatccaattgccgaagctttttgcaaatcaacagtttgattgagtttattgatgccaacaatatagtaattgtgtttgtgataaatcactggtgtttcattctgacaatatttaattacttcctgttcttgcattacatcaattcactttcttaatcactgaaccaaaaagagagcgcaaataaagcaatagtaccagcaactacttccgaacttgctttaaatgctatttcagcaattaaaacagcagttatgcataattggggaatgtaatcacttatatatttcatttgtttgcttcctcatcatagattctgagttgcgccatcattgaaccaactagtgcagcaaacccatctcgggtatattcaagattaacttgggttttcttttcttcaaccccatcatcagttaaatattgcttaaacttttttgcagtaatgataaatttaccagttttaggactacagctaattgatccaccttcacctttcttcacattaaataatgcttcgttttcaattttcattaatctatccccttattttgatcttcttctacaatttcgtttaatcgttcgaatttatcatctacatcgtttaaggcaacatttagagctctcacagcttgaaatgctttttctgttttcgccttatacaattctgcacttacagacaagtcacaaatcatactatacatatcggctaactgcgtatctgcaaaagttctaacattgttttcatgttgcttaatttgcgccattgcttgttgtaatccaagcgcccataatcttgcacgatcgctaatccggcgaccattaggaatgccttcccaccaatcgggatcaaaatcaattagcttatcgcgtaaatcagaagcaaggtcatactcgccagtaaattcatcaaaacattcaattaaatcttgtttcatttcttgacgatcttctaggctcagtgaatattcttcttcatcgtccaatcctaaataatcgcttaattctttttctaaagtatctgagtcatattcgtacttatcatcagacgtttccatcttgccgacaaagtaacctaagctcttgctgtaatcgacaatattatcaagagtatttcccgttgtattccaactaagcacagcactgcctaaatctcctgaaatacttagagtagaagtcattcgattaaaaaagtaatcaatacgatctttaaattcataacctctactcttccagattagaaattcataaggcccatagtgatgataaaaggcaatatgatttttaaaaatatccttgttcattacttccatcccttaatctctttgattgcttcatacaatggtttatccaacccatctaagctacagtaggcatttattacttcttgcttatgtgggtacactacaatgtcattttcttcgtctccgcttgtccaagttgctaatattgcgattggataaccgattaatccaacacccttgccaaaagtaacgaagaagtcatagagtacttgttcgtcattatttagtttcatctttgttacctcgatatataaagaaaatcaatattatagcaagcgctattagcggaattaatcctaagcaccattgaaaaaatactggtgaagaaaaccaaacaattgcataccacgatccccaaaccattccgcctagcataacaaatgttgtaactgcaaatgcattaactaatttatccataaatttcattactcttcctccttgtttagtggtcgcttgcaaaatgggcaattcggaacttttaatacattgattatccctaatgttgtttccatgataggtcctttaccaagtacattgcttataccctcatacactggtccattaccgctacccaaatccaaatcgttttcaataccagttgaaataaatggcttatatggaacgtgacagtacggacaattcttttgcttttcagttagtttcattagcttttcctttctactcccatatattcagggccaaacatggcataagtcatttgtctagcgcttttattggtttctcgacagctttttctccaacgtggtttatgcctgtagccaaatttatgtgctaaattccttgctacatgatacgtatgttgtcgtgacgctacctcatgatgtacttttcgttgtttactcattttctctcctccatgtttccacacgtgactttactacataatcaggcgtatctattttctcgtgtttcacaattttttcgtggtaagggcaaaaatcaattaagccgtgatttttagcacactcatcacacaaagcacaatcacaagttatttgccgttgtgctgacaaaaaatcttgaaagctcgttcttccgcaaataaatgttggtgactcgggatattgaatcacgtaatcgcaccatttagtagcaaagcgtttatggcacacaccgcatttttgctttgaaaaatcttctttaattatttctgccatttttaataaagacgctccatttcgtcttgctcttcatatcgcctaatattggttgctggccaaacgcttcgaatatttttttaatcggtatctgatcttcgttccatttgaatagcattattccagttggtttaagcactcgcattatttcttgaaaggcacaatgaaaatcatgtggccaagtcattaaatcaatggttccgtacttcttagcaagccatgatgtcttacccgcacggaccaaatgtggcggatcaaatacaactaaatcgaaagtttcatcagcgaatggaatgctcttccaatcagcctgcacatctggataaatttcaatctttcgctcattaccacgatccattgctgtgtagacagctctgcggatatccatgtaggttgtatgtggttcctctttgtcgtaccagaacatgcgactgccacagcacacatcaagaattttcatagaataaaccagctttccatatcgtagataaagctttccatctttcgtttgttaaattgatatagcaaagttgtttcatcgctgggacttcgaaacacaagagcttctttactaacttctaaatatccgttgttatcagtatttttatcataaaattcccaataatctgccccaaaagaattagcttctttgggagtaaacgtcttccagactttttctgcttgttcctttaagaatttaagtaaatcaatgttatctaaatagaaccgataatctagaagatcttttctttctgtgtggatttgaatattagacctattcacccgcacaattaattttctaccgtgttcgtcttcaaaaactctctcttccatcattctttccttcctccgttgctatcatcaactgcattaattgaactgccggatctactccctgttccttacataacacggtaatcgcttgatatagaactcccataatctctttaggttcaaaacccagagcataaaagccagctaagcatttatctttattaacttttaggacaatggtttcaccaaattcattcatttcttcaaactcctcataaatcaattaagttggcaactacgaaagcaataatcatcaatccaataatcagactaaatattgtttcaaggctaaccttgcagataatcattgtgataataattgccgttacacaaacaatccccacacataacggtaattgcttcattacttccacctcttaggctttctagctttcttgtgccaccattgtgaccactcataactcgtgtgatcgtgccaagccatcatatgcttagccttagcaatctgacgcttacgagtgcgcttgatcggcttatatccatgaagcatatatttgaaatttttaaaaaattgcttcatttctggcgatttaaaaaagttatccacattttcttgcgtaatatctatatcttcaatacgtttattcattcttgtcctccacaggttctttcattgcatcaattgcatctttaggaaagaaatctgaaagactatctagtttcttttgcgtaaattccatagcatcagctttttcattagcaaatccaaaatggaactcaacattattagcgcttatattcattgcatcaacatattgcttaacaggcactggtccctcagcacatcgcattgcagataaaacatatttcttttcaggaaaacgttctttaataggtgtatcgacatattcctttgtgatttccaaaagattgaaaagcccgtatatatcaatcactggtacagtatttaaatttaatttaacagtgttaaacatgcttgaacatcgatcaaaggtaagcagtgggtatttacctaaataaattgtgagcaaaccatcaatactttcagctacactgaaaccatacctagataatttctttttgaattcattaattttcaatattctctctccatcaattcttttactgtcgtgttgcataagttagcaattacctcgagccttttcttgcttggcattgagactcctctttcccagttactaactgtccctgttgaacacgtagtcgtacctaaaattttatttatcttatcggcaacctcatcttgcgttagattcatgttcattcttaactttagaatctctttgccaatatgttctttttgacgagcatgccgtagtttcaaactatcaaaggacatctcttttcgcttatctatcaacccttcatacttacttctaagtttaggattagcttcgattgttcttcgaagctttggcgtagagcaattaagtttttctgctatttgttttagagtaagttctgtatttagcagttcgattaaatctcggtgatttattttcgctctccgtctatcttttactaactctcgaaattctaaaatcgcttggtagtcttcgtgatcgctttgaactaaatcatctaaattgaaatcatagtcatttaatcgtttaccgtacttatcttctaaattccgtaagtgagttagaaagtcatttttagtaaggtaatcagtcatagttactcctgactacttgttcaagttgttctggatcaacataccgacttacaaattcaccgaacttttcccgttcgtcctcactaatcattactcggctgtgatcataatcaacactaactactgagcacaaagtatcttgataaagaactaaagtgttattctttagcgcctgttccgcctctttcatcttcattttgttctaacctttctacttcaatttcaatacgtggtcgatcactgtagtacttttcagcaactatctttacaatctggttgtcatcttcccatagcagaccgtttaagccatccaaagtagatttgatgtaattatccgtgtccggttttacaatcggtctgtgtattcctgagaggcgcaattcacgctcttttttcgatacgcttgattgaacttgtcgataaaatttaagactaacaattaacgggccagttagtggcttatccttgtactggaatttgcacatcatccccaactgtttcttgtaggtcgatacctttttcggatcatacaagcgtattcctttccacgttttagttgctctaggccgtgcctgttcgacgggctcaatattgaatattattttcattttcacctcgttctttagttcaataagtctttaataatcgaagcaattggtgcacaagcgtgaataatattcaaacataatgccattaataagcagacacttattgttcctccaaacattgccgtcatcccagaaacaaaatcatagctatcatgataatcacgatgcttcctaaaaaagaaaattgatagccatatagtgccagttaacgcagcaataaaaagcacaccgcataaaactgatagaacgattgctgacatttgatattgttgaaccattgtcttagcaacggccggcaactcgctcaattgtccattaagtgttttcagtaattcttgttccgcttcatgtttcatctagtcgcacctctcataagttcgttcaaatatatcttgatcaatagcccagtgctcttcatctatgccagtagcgatgtaatcgccaatgtgcaataacatctctccctctttagtaggtagataataagactctacttggtggtggtgacctttacttctatctaatcctatatgataatcacttatctgcttattagtagccttaaactgttcagcctcgattaaggctgtctttctgtatttatgtagcattagtaaatcaccgtttcctctctataattattaggatcaattggatcgctaacttcaaaatcagtaggcctgtagaaaatagcagtctgaaatacattaagcatatctgcaactaattttttagcgctttcctcgttcttagctatcacaatatgtctgacaaaatataatcccttagagcgcgtgacttcgtaaatgtacattattctttctctctcctttttatagcaattagttttgccatatcgttccattccacattaattcgctgtatcttcccaagataaggacgagtaacaattatcctgtcactagaaagaccttgattaattatttctcgggttgattctcttactattaactcaaaaccattgcgaaatataatctgcgttcctgttaaatactctctttccactagctgctcactttctttcgatttgcaatccgagcctttaatttagcaatatcctcgggggatgctttcttgtttaactctttttgatcttttttactccactcaggcattttctctcgaataggtggacgttttccgtgatttaatctaaattgattaggcgtaatgccatctgttacaaggacatcatcaaatcgcccattaaaccacgttgatccattcataggatgataccaactattgttttgttcacagtaaactaaatacttcttcaattgctttgccaggtaatcatccgtattcttagtggattcctttcgccatgctttgtaatggttaaacgcttcttttttaccctttttatttggatagtctttccaaagtttctcaaagctagttttaaggacagatacggacagtgcattgcctggcgatgcactatgtttattaatatcagtattagtattattagtattagtactatcagtatttagtagtgtcggatttaccgtatccggtgaatccgtatccggtttagccgtatacggaaaacccgtaagcggttggtccgttacgactaagtcttgattaccgaattttccattactatttcgcttctgttttctagtcacatagccatatttttttagttcgtccatgaagctatatgttttatctctgccatctttgttactatgggtgattaattcactcatatgaaatttccaatcgtcaggttttgatagcatatattccagaagacctctagctccccaactaagccttttatcctcaataattcggttgtctataattgaaaatcggtcttttcgcttttgcctaataattgccatttctaatcaccatattttcctttgacccccagtttctttaagatttctggtggcagcttaagtcctttaacatgtatgtggtattttgtttcaaaccttttattattaagtctttcgatttcttgatgatgaaatcgacacaacggataaagttcccgtttagaatgatcaattttgttgcgattattccccataccaactactgacccttcgacatggtgaaagtcggcctttttgccacaaataacgcatttgtctttcagcaagcacttgtaaatgaagtagctttcattacgtggcaacagcttataaccatttctaacaggaacatcaaactcaaagataaaattgataacatccttaataagcttatttgcgtcacttacagtattttctgtattatcagcaagactaatctctttaccagatgtcatttttgaatatcttttatagaaatattcctttaatttttctttaggcatccctgaccactcatgaatatcattaagcaatgcgaagaatagagtgcgttgcttagggtgaaccttgcgaggatccgtaaattcaaattgaataggaactccattgatcaagccatcattcaaaattgcgatatgttccaaattaatatttttatctggaacaattacccacatgttattgcgatagtaagcttttccactttccatttagaatggcaattcgtcatcagccagatcaatactttgtccaccattgccaaagtcattattctgattaccgtaatttgactgagcattctggttttgctgaggactatttgatgttgcgttgtgtgcattattatttggtacctgtgaggaatagttattattagattgttgactattttcttgacgtggctctaatagagagaaactatcgacattaatctcagtcacgtaaactcgctgtccttgcttattctcataagtccgagtctgaattcgaccatcgataccaacaagtgagcctttgtgagtaaaattagcaaaattttctgcagcctttcgccaaataacaagattgatgaaatcagcttcacgttctccttgttggttcttaaattgacgatcaacggcaatcgtagcttgtacaacagccgttccacttgtggtataccgtaattccggatcacgggttagacgtcccgttaaaattgttcgatttaacatttacttctgtttctcctttgatttatgaatatcttctacaaaccatgtatttagattgtcagcattgatttttagcaaattacattcattttgtaatttgcttaaggcatatacttccttaccaaacgtttcgccaccattggcttgtgttatcatggcagcaatcgtgtcaacacgtgtcatcatctgcattaataatgttagtgtaagattttcataggttggatgaataattcatctggtcgtggaaatcttttttgtagaccaatttacttatttacaaaaaaagaaaagaccagtagcctttagtgtgtcgaatactaagcaaaggcaggtctttcctcatggatattttaacagaaatcgagcagaatttggtgaaatcaggcagtttatttgaagctgaacagattattttaaaaggggtattggagttaggacaagtaatcatgcaaaactttttggaaagcttagatcgaagcttaaagtcccaagctccagcgaactatcaagtaattaataaacagccacggacgcttaattttatctttggcccggtgacttttcaacgacggtattatcaggctgggacaaagaaacgtgaattttacttagaccaacaattaaaaattaaaccacgtcgtcgtttatcgccacaatacttaatgatgatggctaagattgcccaaacaactacaatgcgcaatactgccgacattttgaaccttgtatttgacagcggaattactgccgattcggtaatgcacgccgtgcatgagttaggaaatcaggtagctaaacaaactcaagcaaaagaacaccaagctactcctcgccatatgcctaaaaatttaactattgagggtgatgcctttatgattaaaggtaaaaaagaagcaggtcagctgactcttgtgcaccattatcgggtttatgagcgagtagctaatcaaatcattaatcggcatgactttctcagtgttgggcaccaaggacggcttgaagcacgactaagtgattatttagaccgccattataagcttgccggtcaaacgatctttttggccagtgacgctggcccaggttacgaaccagctaagctattaagtctagttcctcaaggtgcacatggtgaatactttctcgaccgctatcattgtttacagaaaattgaacatactttaggccggcacaacgagttagccatgcgagcaattaaagccgttcgtcatcatgatcaagcagagctaacaataattttagatacttatgaatcacaaaacctaacggaaaaacaagcagacgacctaatgcgtttaagaaagtatctacagcgaaattggcggtatatcctctcaccacaaatgcgtggatttaaggatattcatttaattggttcagtcgaaagttctcaccgggcttttacttaccggatgaagaaacagggcaagtcatggactaagcagggggctaaagccatgattggtttaattgaagcccgaatgaatggtgaactgcaagctagtttaaatacaatcctagaacaattaacagttcttcctcgagtggctcaaaccagcctattacaggaaatgcatattcgaactggagagtttctaagaaaggcaccgacaaagccgtcaattggagcagtacaaggaataattccgattaacacggccacaagtagaccaatgggacaactttttaaggcactaacccactaaaactgtatatttaaaggctacctatgaaaacttgacagatacattaataattgttgtttcgtatttttaagtgtcatgtgttatactcaccttgtgtattgttttttgatatgagcttttaactatttgcggtagttttaagctctttttctttttgcttatcgactttttcaaactcagcagaaagaaactcaaatatttcttttgcgattggtacttggtcttcactcatttcatcaatacggtgcagatcaagtatctttttcattggtacataaaacatttgttgaacagaattgtaagacgtttttcgacgccattttgaactcatatgatcgtgacaatagctgtcgatacgttttcttagttgcaaccagccagtagtaatcttcggcgtattccttttgttcagcgcttcatatacttgatacttaactttgtgttcaataattctgtttaactcttcttctgaaatttccatttatatcacctcccctcattgcaataagttaggaaataattcgcctagcaagataagaatcagtaagacagccaaaggaaggactccaaatagtgtccaaccgccaagccagcaaatgaacatcaagaaacatattcctgtgcatgcaaaagctctcaccatttacacctcaaatccataatcgtcaccatcaccactgaactctaagaccgatagacttcttaagagacaatcctttgagcaaaaaatattatctttaccatcaggatcatcaaaataattacgttgcagatagttgtctcctacaatgtaataggtatcgtctgggtcaatatcttttccgcactctgcgcattgttttaattctggttcttcaaacatttttaaaactcctttttctaatattgtgtcgcccacgataacgtggttttagtattttgagactattaccaaccaaagtatcaattattgccattaagatgagacacattgctatcacacaaattgaaacaataaattctgtcatcctatgctcctcttcgtaaacgtccagatttttgttgatgatactttgctgccttgtcttctaaaaaggctacccattcattttcatgaatccagtaagtccgaccagtaattctaataatcgccgtactaaattcatcattgagttcacactcagccacaagatcgctaaattgacttttttctagcccgtactttttcattatttcgtctttggttttcacgtcatcacatttcattactgatcctcctcatcaagattcgtaaaccgaatatgagcaccttgtgactttaagaagtcgattagtaaatcacttcccgtttggcgttgatgaaatttacctaaaatgttcataattcttactgctgtaagttgtacgttgatattcaagtattccaataagaacttaatcccatcaggaatcttgttattccagcctacgttatcccctatccaatctgtaacagtgtaataatctttgcttccccaagtatgtcctttgtattctttggtgattggaaatacttgagcaaattggagaggtgttagtcgcttaagtgtttcgtctagcattaagacccatgccttttgcgtttcccagttacattcttcaatcacaggtgtccaataatgaatcaaaataaaagctagttgctgtggggttcttttctcgctcatattcaatcagtcctcaggtttagttaatggcaatttatgaaccttttcccacttattaagggtgactaattgcgattcagtaatccgcttagcattttgtggaagactgtagtaattaagctgattagcataaccaagtgcttcttcaaagtcactatgaaggattgctgtatatttaattgctccaaaatggtgcttagttaatgaatagaatgcacgaacaatatgcccatatttcttagaaaagaattctttaccaccatattctgggttattgaatttatgctttaaccatgatttagtggtcactgcggctcgacttgtaattgcttgtttaagccgatttgcttctccatcagttaaaggaataaacttcttaatctcctcaatactctgattggtatattcttttaattcttgctttgcttgttccgtagattcagcaattgattcatataccattttgttaatctcggcttggagtgcttgtgcttttactaaatttccaagcacagacaagctagatttctctttactttttaccggtgctgttaatgtttctttcattactgataatctccttctataactcgtcgaccgcctaacattgaactaagtcgatcaatcgaatgttgtaataattcaagacgcttttgcagattcttttgtgcttgttcacccatctcatcaatatcttcttgactaagtttctgcaattcaggaatccaatcattaatttttaacgaagtgctatagccgttaatttcagcttggcgcttttttcgtttcaattcttgttcctgtaacttgtcagaactattggtattttttttaatacgttcagcggctttaagttctcgtttgtaatactcaatattttctttgtctttagcagactgttctttcaattcaacaatcttagccttaatttcgtcataatcatcgggcttaactggaacttctttagttactgtcttagtaataactttttgttctggttgctgcttagataattcagaattacgtttgttaagctccagttgcactttacgattgtcctctaattcagcttgttgattagcaattgtttcgtcacgatcagcaagttcttgttcgcgttgtttgagtttagcttctagtgctttgtactctttatgagttttaatatcaccgttaaggactttcttagttaactctggatcagcacttggcttcgaaatatcataagttaatgacttgggcagagactcaaacgcttgtatttctttactgctgtccaaattttgaacagcaacatatctattgatgtagttgtaagctgaagttctactaaagccgatgtactcaatccatttggcaaaggctccattgttatggaaactagctaattttttctgtgcatcatataagatttttccgatttgagtagcactatccgaaacaacgttcatgagctggtgagtactttgattgaggaaagctattgttgaagtatctaagctaggatcagaaaaactcgttaaaggcttgttggtattttttcccattgatagctatatcctcctttaattgttgtacatatagtcgttcaaccatcctgtttgatatgcgaattgttttgatccctttgttttcaaagaatttgtctcttagtgcatctgcaacctgccgatatttagaattgtgactggcaccatcaatttcaaaaattgtattagtgtcagggtcaaaaaagtcggcgacgtatttcttcgatccccacttggcaagaccacccttccctgttccaaaagtgacttgccgtagtagctttggaaacatcgttccaaacatgaattcgtgagtagtattttgaaaacttgggtgatttatctccggtatagtagtaacaatttgcttaatcgcattcgtgacaatcactccttttctttagcttgagataagtgcattaaatactgtggtgttacgccaagataatctgcaacggcttgaagtaaatcatatcgaggcaacgcagtattccagcgcccgatagtgccatttccgatttttaaatcatgttctatgcgatagatcgatttgttctgctcacgggcaacctctttgatagctgtatatagaggcacactttcacctccctagtgtgagaaaactgcctaattcttttgcctattagtattgacaaataatagactaaaatctattattagagtataagaaaaacaagggaaaccactaaggctcctaaatcagaacagttatcgtaattgctatgtgctccctcaagcacaattacagtatattagatttgtgcctaatggtcaacccctattttagatttgtttctattaggagtgactttaatgtctattaaaagcagaattcaaggcctagccgcacaacgccacgagacactcgccgaattggaaagaaagctaggtataggaaacggaacaatcacaaagtgggataaacgatcaccatcatctgaaaagttggcggcagttgccgatcactataatgttacaactgattatcttctaggacgcacagatactccacaatttactcggaaagatgaacgagatgtacaaaagatattagaagatattacaagaggattaaataataaatctgatttagcgttcttgaaaaatggaggcgaggaaattgacccagaagacgctgagttattaagtgcctcgcttgaaaatgtaattaggcagtctaaactaattgctaagcaaaaatttacacctaaaaaatatcgaaaagataaggattaatgaggtgacttatatgttatctaaagaatggattaaacataaagctcacgaaatagtctattcaactggaacgcacaatccttttaaaatatgtgaagaaatgggtattccttattattatcatgatcttgggaaagaaattatggcttatcatactaaaatactacgagtacctgctattgttttatcaacacgaaatagcaattttgaaaatagatatgcatgtggacatgagttaggtcatcatttttgtcatcaccaagggaatactgaatgtcttaatagaagcaatcgaaaatttgttacttttggtgaagaatatgaagcaaacaaatttatggtagatatgatgcttgatggagttaacgtccatgattttgaaacaagggaacaactaatgagatactgtcgcatcccttcttgggccgaacggtacattgattgggaattattagtttagccgaataagaaattggggggattattctatggaaaataacaaattacgcttatgggcaatgcatcatccactaaaagcagcatattgttggagctttattgttttaatttttgttgttaatctcaatatttcgggtttactcttaaacttcatttttattttgatgaccattatatggatatcatctgatatccaatcacaacttgcaactaaaaaaagagctattaatattcctaataacacttatcgtaatcaaattgactttagaattcctctatacttaaatgctactctatttgcgtatcttgctataggaagttttgttgaaggaaatttattaattggcatttgcttatcattaattgctatctgttcttttataccctttaattatcaagacagtgagtataaccatatgcttaaacaaagcaataaattacatgaacaagacgaaaaattaaataatacaccacccactaatcaagttagtactactcctatcttgaacaccgatgttgaagtttcggtgcctaccaacgttgaaaaacatgttttacaccataatgagatcgacttgattaaggagcatgccaaattagttaataacaacataacgcttaaatcgaagaaaaaaacaaaaactactagtaacacactatatattgatgtagcaggcactaactattatcgattaaaaaatgccgttggttatgcaagaagtaatgatttgttttttgtaaggtatgatgatatgacagcatctgagatccgtgaagatttttatactgatgatgatcctgtctatgaaacggatctcactgatgtaataaatgaaatcaaattaattccgatctatgtaataaatatgatagcaatgccgttaaagtcattatttacattgaatctcaatcttttatgatcggatacattcctaaagaaaactcaaaagatattaaacgattaattgaaaaggaaagggcagatttagtaaagcttacggtaaaaggatatatgactggtggaaagtataaagcagtcaatcttgatgaccatatttatactggtgagaaaccttattcattcagtcttcaaatttcagtagaaaaaacaccttttgctcaaacaagtaaagggaaaaataaggaacatataattgatcagaggaacgaattaataattcataaactaagaaaaccacttaattcgtttgtgtcagtagatatagaaactacaggactaaatgcatcttttgataaagttatccaaatttctgcagttaagtatgtagacgataagctaattgatacgtttaatagttttgttaatccgggtaaagagaaattgccactcacagaatttataattaataaaactggtatcactactcaaaacgtgaaagctgcaccaacttttaatgatataaaaggttcatttgaaaaattcgtaggtgatcttccttggatcggtcataatatctttgcttttgatattcctttcttatatgaaagtggtctttcaattaacgagttctatgccgaagatacttttataatcgcacgaaaacatttagatcgaacagtattaggaaatttaaaattacctactctaaaagaatattatggcattaatgagccgtcacataatgctctagctgatagtaaaactgctgcacttgtctataagcatctcagagatgataagttacctaaaattcttaaagatgctaatgataagatgctctcattaaacggtattcatttcttagtaattggtagcttcccagaattcgatcatgatcaaatgattgagcaaataaaattacgcggtggtatcattgaaaatcgctggactaacaacactcaatatttaataaatggtattactaataagcattacaaatctattcaaaatgcaaaagatcataacgttcaatttttaaattttaatagtcttgttgctttaataaatacaaaagatcaacaattacaagtattcgataactaatgaatttaaaacggtcaaatccgtggccgttttaaaaagcacgttaaaagaacacctgtttgcattttaaggaggtgatgtcctatgaaaaataaaaaagcccattccctactgcaataggaaataggcttgactaatttcaccaatcttcactgcaatggagattgattgaggagttaaaaatcagttatatcccctaatttttaactccttcattataacatttatgtttatttgaatggaggaacgttttcatgtggattaattcgtataaaactagcaaaacaataaaaggcaaaaacgttcaagttatacattatcaatttcttgaacgttacaaagatcctaagacaggaaaaaataaaacagtttcagtatcatatgatcgaaatacgccccaagttcgtaaagaagcaactaataaactagagaaaaaaatagaaaaacgtattagggagataaaatcaagcaataccaatattacgttacaggaactgaccgatgaatttctcgaatactataagcatcgagttgctcttcgaacttatataattaataaaaatgttctacaaacaacatgtaatactcttggaggtgacacgttagcaaaacgtataacaactccaatgttaaataaatattttgataatcgcctttatgataaaaagcacccagtatcaaatagtacagttagaaatactcgcaaagccctatcattagcttacaagtttgctaatcgttatggatatttgaatattaatcctgtgaaagatacggaagtgaattggcgcaacgaaatagatgcacggcgaaatagaattgaaaacaaatatttaactcatgctgaatatcgtaaaattatcaagtattgtctcaaaaagcacaaacaatactatgccgacgcttttaagcttcagtatcttacaggtttacgttttggagaattgattgccttacaagttaaagatgtgcttaaaaaaagtggatatacttatcttgatatcaatggaacaatggtagttaccgacgatcactcaaagcagatcaaatcagatcgtacaaaaagtattgccggaattaggcagatcatgctttcgccaaaagccataactattgttaaacgcaacatgaaggataaaaatccagatgactggttaataacccagccactcacacctaagcgtccagaaagaccactgagattaaatacagcaaacgtctttcttaaaaaagcttgcaaagaattaaagataaataaaaaagttactactcacttttttagacacacccatgtatcaaatttagctgatttaggaatccctttgcgggtaattcaaaaaagagtcggacacgctgacagtgaaataacccggcggatttatttacatgttactaaacgtacaacaaaaaagtttattgatatgatcgattcaattgatgagtttgactagcaataaaacttttcatttctgctatatttgtgctatataaatcaatttaaaatcgagtaggagataattgattagttcaattatcgacctctcacaccaccgtacgtacggttccgtatacggcggttcgacaacttaatcacattgaattgactggagcgtcttggacatattcataagtccgagttgttccagttttctattagttagagaatagctcaaggtcttactgtgtgcagttcgccagtagcccttgcgggtactagcgaagacatatgcatcacgctgggacagccccagcttctgtaagttagttaccttagttttaagcttcttccattgcttccagatatactgtcttattcgggccctcaaccacttgtcaaggcgttgaataaagtcagttagtttcccaattgagtagtactgaagccatccacgcatttttcgatgaatttcttcaaacattcttgtcagggatattccacgattacgtttagttaataacctcaatgctttctttactcgttgttgcgattgttttgctggacgggcgtaggctccattgtggtctacacccaacgaaaagccaagaaactttaaccgtagcgggctaccgactttggttttatctgggttcactttaactttcaatcgcttttcaagaaactgggtaatgcttcgcattactcgttctccggctcgttgacttttaacataaatgttacaatcatccgcatagcgcacaaagtggtgaccacgtctagtcaactctttatccaactcatttagatagatattcgccagtattggtgacaatggccctccttgtggggttcctttttcactcttagcgaaaagcccatggtctaagactccgctagttagaaacttacgaatgagccttagtgtccatgggtcatcaatatattgttgaagatacttaatcatcaagtcatgattaacattatcaaaataggcttttaggtctaagtcgacaactcttcgataaccttgattataaagatctactacttttgcaatagcgtcgtgagccccacggtgagggcggaagccaaaactattatcagagaaaacacgctcaaagataggtgtaagaatttgggccacagcttgttgaaccattcggtccaccactgttggtattccgagttttcttactccaccattaggcttcggaatttctacccgtttgactggtgctggtttatacttgccctcacgcaaactagcgatcaattccgtcttattttctctgagatatggcagaaggtcattgactgtcatatcgtcaatgcctgctgcccctttatttctcttaactcgcaaataagcctgattaaggttattgcggtccaagactaagtcttggatagtgacactcatacctttaccttcaccataatcggtactacgcgcccttgtgtactttcggttttccaaacctatcctcgacaagcggtcagcttgttgttctgttttctgcgattgtcgcacctgattacacctccgatataagttacaagttattgtcgttcagtccttcatctgattactcagactactatgacctcggctgacttctggcttactcaacgctacatcactgcaccgcttgtttctgtggaaattaaacttattcctcttgtcggaaacgtgtaggccagatctcccgggtaaggatattaactttcgtaccatgtcaccggtagctttactgaaagtaacttcgagtagtgttggactttaacttgtcatgcagtcttatccagttagttccagccttatagctacttcttgttcatcggtgcagtactttgccttagacttccttcagattccacctcgcagtggacacccttgtcctcagctcatggttccgactactacggcccatagcggactctcaccgcctagctaatacccatgccgggcgcacacgaaaaagaaacccttgtaagtcgtggcatacaagggtttctttttcgtttttcatcttgtcttgaagacaaacgttttatatttttacaagtcctattctaataggcttttactgtcatgtcaacgtttataacttggcttattttccgtactattccgtagttttccgtaaaaccagatatcttctgccccctcagtgcgccttcggattatttcacaaattcaattttactttttctttaataactgcacttcttcaggctttaatgcacggaattcacccggctgaagaccatataaatttaatggtccatatgtttcacgatgaagtttagtcaccggatgtcctactgccttaaacatattcttaacttggtggtttcgtccttcgtggattgttaattgaacaaggcttgtcttcttggcacggtcaacattcaagagcttcgatttagccggttttgtctttcgaccatcgatgactacccctaaacgtaattgttttaactcatcatttttgacgattccttcaaccttagcaacataggttttttcaacttcatatttaggatgcatcagtttatttgccaaagcaccatcatttgttagaagaagaattccagttgtatcatagtccaatcggccaactggataaatgcgttcatcaatctcagcatcatgaataatatcaaccactgttcgacggcctttatcatcatgagcacttgagataactccccgcggcttatttaacaagtagtaaacgtgctgttcgtgatggattggaacaccatttactacaatctcatcgtgaacgctaactttagtgccaagttcagtcacaatcttgccattaactgcaactttcccttgaaggataagtttttctgatgcccgacgagaagctactcccgcttccgccattgccttttgtaatcgttccattaattatcgtcctttcgttcttctcgcgcctgtaatgcttcaaggaaaatatctccattaatattgctcatttctaattcgtcttgatcggtaacggtgggagttcatctaaatcgcttaaaccgaaatagtttaagaaagccggggttgttgaatataaaaatggacggcctggtgcatccaaacgtccatgagtgtcaactaaaccacgaaccattaatttttgtaatgatcctgaactttgcactccccgaatatcatcaatttctagccgcgtaattggttgccgataagcaacaatggccaatacttctaataatgctttagtcaatggtaccgttaacgggacttcaaagtaatgtttaatgacctctgctaactgaggcttggttgctaaacgataggtctgatcactttcaagcaagataaaagcagatgtgggatcatcttcatacttcttttttagctcttgtaatattgttagaacagccggtttcataaaaccagaaatttttgctaaatcgcctagggtaattccttcgtccccactaataaaaagtaatccttcaatctgcgcttggttggttagtttcgtattcgtcactcttagatccctccgctaaaattattggttcaaacaagccaccttggttaataacaatcgcttgatgctttgccagttcaagaattgctaaaaaagttgtaactaagccatcgcgagtatgtaaatcttcaaacaagtcttcaaacctaaccggaccatcatgaataatttcaatcacgtggttcatttgttgaccaacgcttactttttcagctgctacagtttcaactaatggagtagctaattgttggcggcgaagaacggctgcaaaagcttgttgcaaatccgttaatttgatgcccggctccacgtgagattttaccatttcacgtggaacttgcattgctggtcgagtatactcctgttgacgcagattttctttatcttttagtcgatctgccgcttttttataacgctgatattccaaaagctgttccactaattcttgtcggggatcaagctcctctacttctagttcatcatccaatactggcggcgaaggtaacagcatctgacttttaatgtccatcagagtcgcagccattacaaaatattcacccgcgacttctaattggtggctttgcatctggtgaaggtaatcaaggtattggcttgtaatttgcgaaatctgaatatcataaatatccatttcagattgctttattaaatggagcaataaatctagtggtccttcaaagtcatgaacctttatgaccggttgaaatggattttgtggttgcacttgcttattcattacttctctcccacatgctaattattggttgggttgctaaggttcccatgaggcgtttatgaggatattgatcgtgaacgccatctaataaggaaaaaatattataccccgttcgttcgcttggcgtaaacgataagcggcgaaccagcacgtaacaatcccctatttctatcatcacaattccaataaagtgactatcatccatgtctttccacaaaaagattggccaatcattagccagtgcccagtccatctcttccataaaacgattatcttttcgaaggtcttttactaaggacaataaacctagggcgattttttggtaatcttttcgataacgaactaacatcgtattttcctttctatgcacgaggatgatatttcatatagttagcggataactgttgcggcgagacctgtaaatatggttggagagccttcatcgcgttataaccaaggatttcttggattaattgaacatcggcgccattttctattaaatgaacagcaaaagaataacgcatagtttgaggagtaacttcttttttgattttagcctcactgacccattccttcatttttttccaaattccttgccgcgtcaaaggataaccatgagcatttaagaacacccgagtttcgtgatcatctctgagcaaaagtggtcgaccacggtttaggtaaccggtaagccacttgactgctggttgacttaagggaatcatccgctcacgttcattctttcccgttagttgtagaagcttaacgtcgagatgaagtgctgtcagatccaaggcaattacttcactaaccctcattcccgttgcatccataatctctaacaacgctcgatcacgaagaccaattggggttgaaacatccgggactgccaacagttgttcaatttctttttcagttaaaattaccggtgcaggtggttggttaaaggtatactggtgatcaatcatttccattggattaatggttaggttatggtgacgaatcatgtatttataaaattgccgtaaacttgaaatcacacggttaattgttgaattagcttttccctgctgacgaagactattaaggaggtcaattagcaaatagtggtccacctgttgccaatcatcaattcctcgatcttctaaataagtcacagtttgttctaagtcccgttgataactcatcaaggtattatcgcttaattgtcgtttatcttttaaaaaagctaaaaacgcagccacttcattattcattaatcttgattctcttttactaggattaattgaccgttttcttgttttactaatttctctttaagcaaatgcccaatagcacgtttaaactgccccttgcttatgccaaagacatcgcgaatgatcgatgggtccgtcttatcagtgtatggcaagcggtgatttataccatgttctaacattgtcaaaatcatttgtgcatcttcaccaatagcttggtaggcacgaggcttaagggagagattgagactaccatgtgacgaaattccaataacccgcgctttaactcgttgacctaatcgcggttcttggtctcgttcacttggatggatgaatcctaaacgataatcatcagtaatcacaaaggttccactcatcttaagacggtaaactgtggcataagtatcatggttgagcaagcgtttatctggagctgctgaaatagtttgatagatttggtcatctgctaatttaccccatagacggtccttatcatcaacttgaagggacattaataaacggtcacctggttgtggccataagtgtttcaagcttggtaaatcatctaaagagacgacaatatccttattgggaagaccgatatcaacaaaaacccctaaatcacgacgaacattaactactgtaccataatcgtaatggtcaacctggatcgttggaatgtgtttacaggtcatctgtagttggtggtcctcattttcataaacaaagccgcgtacctgtccaccaatatgtaattcttgaggactttcgcttttcggtaatcgatacgtttgcccattacgatctggttgaacaaaataatcggtatcattttcatcaatcattaccgctgtaacaacttttcctaatgctgaattcatttttatcacttatccttttttattctatatcgattttacacggtaaaggcttattttgctagtaagatcaatgattatcattggtataaaaaaagaccggttactaatgaccgatcttttcgcagacaatattataaaatattagtcgatagtcttaacacgcatcatgttagttgcacctggtacacccaaaggaacaccagcaacgatgatgatcctgtcgcccttcttagcaaagccaagttcaacagccttcttagcagctaagtcgaacattgtatcagtgttcttcatttcatcaacaacgtatggttgaacaccccagttgatcataagtccacgttctacacgttcgtttggagttaatgcaacgatatcagcattaggacggtacttagaaatcatcttagcagtgtagcctgaagcagtgtaagcaacaattgtgtgaatgtctaagtctttagctgcgttagcaacagcagaaccgatagtttcagttacgtcagacttgtcccaatcgaacttttcagtaccgaattcccaaaggtggttttcagccttgatgtcaatgttgttcatcattgcaacagattcaactgggtagtcaccgttagcactttcaccagaaagcatagtagcatcagtaccgtcaaatacggcgttagcaacgtctgatacttcggcacgggttggacgtgggttttcttgcattgagtcaagcatttgggtagcagtaataactggcttacctaattcgttacaacgcttgatcatgtgcttttgaacaattggcacattttgggcaggaatttcaacacccatgtcaccacgaggtaccattaaaccgtcagaaacagcaatgatttcttcaaagttgtcgataccttcttgagattcaatcttagggaaaatttgaacatcttccatgttcttttccttaagtaattcgcgaatgtcaagaacatcttgagccttacgaacgaaggatgcagcaatgtagttgatcttgttttccaaaccaaaacgaatatcgctactgtccttttcagtaatacctggtaagttgattgatacaccaggggcgttaacacccttccgagaaccaagaacaccatggtttaagacgtgacatacaagttccttgtttgcatcgtctttttcatcaataaccatgtcaattaaaccatcatcaaaaagaacatggccaccaacatgagtatcatcgtataagcctgggtaggtaacagcaatcttgtcatgagtaccttcaattgaaggatccattgaaatgcgaaccttgtcgccaatttcaaagttgatcttaccttctttttgaacagtagtccgaatttcggcacccttagtatcaagcataagaccaacgtgcttgccagtaatttcttcagccttgtgtacgttttcgatccgacccaagtgttctgggtggtcaccgtgtgagaagttgaaacggaaaatgttagctcccgcattgatcaacttaacgatcgtatcaacatcagtacttgcaggaccaagtgtacttacaatcttggttttcttcataaatgaatctctccttttgcatctatagcatcaatcacaatctgtaattgtatgcctcatttgcacactgttatgatagcacttttcaaataacgtgtctttattttttatgcaaaaggttttaaaaaagcgctatcattctaaaattagttattttttctaactgttatttaattttatagctttcagtgattactattaagctgttgtaagacaacgttttcttggccaagaacggcgacaagcgccttttttgctttctgagaattttttaaccatcgtttttggtcaagcaggatcttcttatcgtttgctggataaaacaacaagacaggaattgaaccatggtattcattaaaaatattatttaactctcgatgcaccatctcagtgtctaatgacggtaagattcgtaaaacccatcgttgcttgcggcgtttctgttgaacttttttaacatcctgcaattgattagcaactaattgtagaccccgtccctcacgatattctactcgacctctgacaattaaaatcttatttgtttctagttgctctttgaactgctgatattgtttgggaaagacggtaatatcaattgctccggtctcatccgttccattaacaaaggccatttcccgatgttcacgtttagtataaatagtcttaacgtgatttgtaaggacaattattgtcgcttctgaattcgggtataaattagcaattttagttgcatggagctgctgtcctaattggtaatattgggtaaccgggtggccggaaagatacactcctaagtattcattctccttcgttaaacgggtcaacagagggaattcatttcgttggtcaattgccgtttggagagccggatcgtcaaaattagcaaaaccagcaaacaactcaatcccggaaattaatttaggaagggcgtcaatcatctccgctcggttatattccatcttatcaaaggccccactatagattaacggttcgattaattcttgcttttgccaacgttctggaatacgcgcaataaaattacgaagatctgtaaacttgccattttcctgccgttcttcaagaattgcggcgacaaaatcacgacgtactcctttaatagcagaaaagccaaagtaaactgtcccatcatgtaatagaaaactactctcacttatattgattcgcggcccactaaccttgacgccaaattgctttgcatcccccacgtgccgtttcaatttctcaatattagtttctgcattcattagggctgtaaaaaaagctgcagggtaataaactttcaaatatgccatctcaaacgccatcatagaataggcaactgcatgcgaacgattgaacccataattagcaaagcgatcgatatattcaaatacttggtgagcaacttgtgctgaatagccgtgttctgttgcgccggcaataaattttgtccgcatatcctccattgtggcctttttcttcttactcattgcccggcgtaaaagatccgcctctcctaaggtaaagccagccattaccgaggccaactgcattacctgctcttgatagaccaaaataccgtaagttggtcccagaattttttcaagtgaaggagcaggataagtaattttctcttttctagctttgcgggcggtaaaatgagaaatattttccattgggcccggacgataaagtgcattcactgccacaatatcttcaaaattcgttgggtgaagattgaccaatacatttctgatcccacttgattcaaattgaaaaatcccttcagtttttcctcgctggaacagttgaagagtcaacggatcattaaagttaattttttgcaaatcaaaattagggtcttcttgccgaatcatttgaaggatgttatccatgattgaaaggttcttcaatcccaagaaatccatttttaatagccccagcgcttctactgtgtctttggcaaactgcgtcattaataagccatcactaccatcttgtaacggcacaatttcatgtaatggctgctcagaaaggacaatgcctgccgcgtgaattgaataatgacgcggcaatccctctaattgctgtgcaacttgaattagcaaacgaaatttaggattatcgtcaagaagattttttagttgttgtgactcctttaatgcatctttgagtgtcacgtgaaggccatgtggtaatgcatcgattaacctttgcatatcgtaacggggcaagttaaagacccgactcacatcacgaacgacttgtttagcggctaatgtcccaaaagtaataatttgggctacgcgttgatgaccatatttttgatgtacatactgcaaaacttcatcacgccgattatcaggaatatctaagtcaatatcgggcatttgagctcgttctggattcagaaagcgttcaaataataagtcgtattgcaaaggatcaacttctgtaattgctaaagcataggcaactaatgatcccgcagctgatcctcgtccagggtcggtcgtaatcttttgctggtgagcaaaattcattacgtcccatacaattaagaaataatcatcaaagcccatttcatggattacttttaattccatcgctaaacgttcttggtactgttgaatagtttttcctggtgctactcgtctttttttcaatccttgaatacatagagaacgtaaatattgttgagatggtatccctgcttgatttttaaaatgaggaaggaccggggccctaaattgaagttcaacgttgcagagggctgctacttcaactgtcttttgcgcggctgcactaagtccctttgcattgtaatcttggacaatctgttctttcgaatgaagataatgttgtcctcttcgtcccgcttctattgtcggatcttttaactcaactccggcatcaattgcttgtaaaacccgactagcaaaaaggtcattagcatttaaataatcaactggagacgtccctactaatggcaaagatagttgttttgataattgttgcaaggtatctatttgaacgtcatctaaccgcgaattgactcctaacagaacgctatcatcatcccccagattagcaagctcagttaaaattgatgttggctgagcaagtatactaaaaactgtactttgtgggggataattataaacaattcacccaataaacaactaatttgcgcaatcgttaaaggtatttttttatcttttcgtgtttgctgaagcgtcgataggtctatcagatgctgataccctcgttgattcttagctagaaatactaaatctagcttggtaccatccgtctcatttaatgcaactaccagccgcaagccgagaatgggtttaattcctgctttttttgctgcattataaaattcgacagccccatataaaacattttcgtctgttaacgctaatgccttataccctcgttccttagccgttgtaactaggtcagaaatccgggtgggactttttagcaaactataactactcttaacatctaagggcgtaaaatccacttcatttcacctctcaataaaattatatcaaatcaaactaaatagagaaattaacccaaccctttcaaaagcattaataaatatgctagaatatggtatgacttcaaaggggatgaccaacatgaactttttattaaagaatatcgtggctggtatttgggcacttattctgggtgaggtcctagcttacatcacaagtcaactagaatcgatgacaccagactacacccttgtcggctggtgttctgtaattatgggattagtcgttatcaattgtgtggataaaattaccgcagatgcaaatcctagcaaaaatgaagattaattaaaaaggattgagtccaaaatggctcgatcctttttaatttatttatcttcttccgcagtcaaccgcacaatctcaagcagggtgtccaatgcgcgttccatcgtttgcagtgatacatattcaaaacgcgagtgcatgttttctccaccagcaaaaagattaggagttggtaagcccttataagaaattgttgaaccatccgtcccgccacgaactggatagatatccggtttaatgtctagattttccatagctttcttcgcaatttcaacaacttccatgtgattcttaagcgcatcttttaagttgtagtattggtcataaagattcatcgttactaggtctgcaccaagttcatcatttaggccagcaacaacccggtcgagtaaatgcttccgttcaataaacgtttgcttatcatgatcacgaattaaatatgtcattgaagcatgatcaacagttccatcaaacttgtataagtgatagaatccttgccgtccatctgttcgttcagctcgatcatgtgctggcaagctattttgcaagtcaattgcaacctgaatagcattgatcattgttcccttagcaaccccagtgtgaacatcttttccttgaatctcaatttctgcctgagctgcattaaatgtttcatattccaattcgccaagtggaccaccatcaaccgtataggcaaaatcggccccaaaatccttaacatcaaaatgatcagccccggtgccgatttcctcatcaggtcctaaaccaatcttaattgttccgtgcttgatttcaggatgagccatcaggtaagcagccattgtaacaatctccgctactcctgacttgtcatcagccccaagcaaagtagacccatcagtagtaattaaagtattgccctgatatttttccaatgatggaaattcagtagtagttaaggcatattggccatctttatcaagcttaatatctgacctgccatcgtaatctttgacaatctgtggattaacattatgagcattaaaatctgcagtgtcgatatgggcaatgaagccaaccgttggcacatccttgtcaatattacttggaattgtagcgaccaaatatgaactttgtggattaatatgaacatcactcaaccctaaagatatcaattcatcttttaattcatcccgaaatgtcaatttaagttagaaagaaagtagttgctcatcagtgacgtaggacatgaatacctcatatggagttcgatagcctagtgatttgcggggcaggttatttcgcttactcatcagttgggtcaccaattcatcaggaagattgcggaaatctagctgttttgttaagccgtcccggcgtaaaagaccgttgttgttttcgttcagccctcgttgattgggagcaccaacctcggcaaagtaagtgtgaaggtcaaattgattggcaatctcgcgccagccggcgaattcttttccgttgtcaaaggtaatcgatttgaagaagtgctgcgggaatttccgaagccactgacctaagtgttggttaatcgcatcagccgtcttttcgtgcacattgagtacaatttcgaccttcgattggcgttcggtcagggtcattaccgccccttggtgctttttgccttggacggtatcagcttcaaggtgtccaaattcagtggcatagtgcggaaagtccttggcacgctcgtgaatacttcgccccaattggccagccttcccgcggcgctcaatatagccattcgggtgccgcttacctcgcatgggcaaagcacggacatccaaaccgaactgcccccgttcaaacatccggtaaagagttcgccggttacaactaattgggcgctcagcgcgcccaataatggtgtcaggcgtccacccctgggcaattttgtcgttgatataagtaagttcagccagtgacaactgagtacgttttcggccacaacgttgcttattgcgcatatagtgatcttgataatcagcaattgaggcaccggtttccaggtaacgataaacgcgataaacggtttcggcgctacggttgatcatttgggccactcggtacgctttaagcttttgcacgaaagaatgggcgatgattgtcagctcgtttgtggtaagatgggtgtaagtcatttgtggtttcctttcttttgtttaggggtattcaaaagtctaccacaaatggcttttctatttttctaacttaattttacaaacggcgcatttaaaaatgcagtttccttaggatcagaaggaattgtttttgaatctggatttgaccttgtttcagttttaacatacttcaaaaaacgtggtaataacccctcatacttttcctcactcatgattagcatctccttatctaaaacctatttagtaataaaagtaaacggctctgtattaactctactctctagcacctcaaactgccaattattttcattcttccactgggtgattaagttagcaagctggtgggcagctaccacttcaatatgatgtccaggatcaataacaacaaggtgattagcaatcatatcgtgcgcaaagtggtaacttacatctccagtgacataagcatcagctccagtttcaagagcttgttgataaaaatcttgaccagcaccaccaagtactgcaacacgtttaatctctctctcttggtcaagcgggttgacaattaaccgtaatccgcggatgccaaaaacatccatacaataatttgcaaatttttgcgatgttaatggttcattcagctcaccaacacgccccattccaactggttcaccgcttattggatcatttcctgctggcactaaaggcacagtattagttaggtgaagttgatctgctaaccagtcatttattccgccattagcagtatccaaattcgtatgagctgcataaacagtaatattattcgccaaaagtttagcgtacattgcattttgcggatcccgcgtatctagattctttgctgggtgaaacataatgggatgatgagcaaaaataaagtcaatattttgttcaattgcttcatcaaccacttctgggcgaacatcaagggtggtcattagtcgagtaatcgggagatctggattgccaatttgtagaccgacatgatcccatttttctgctagttgcggattagcaaatttttcaaaacgcgcaattaattggttaccggttgtcatcggcgatcgcttcctttacttgtgataaaaactcgtttatctcattaatcttttttactggtggctgttgagccttttgcatctgatcaataacatgggcttcacgttgaagatattcttgccattttttcctaaaaacaggccctttgttttccaataaaaatggtccaaaatcaagctcatacttactgtatctaaatgggacaactgatggctcagcaacgataatctcataaatatgattgtcttcttcaattattttttcgttcattatttggtaataattattcattaaccattcacgcaactgactttcccctacattcggttgaaggacaagtcgcttaattcctgttaacttattcttgtctttctctaaaatcgaagcaatcaaactcccgcccattccggcaatcgtaattgtatcgactttatctgctggttcaatcgctgctaaaccgtctgccaaacgtgggataacctggccttctaattggtggtcttttatttcacgaacggcattttcataaggaccctttactacttctccagcaattgcaaaatcaattttaccatctaacaccaatgcggctggtaaatacgcatggtcagaaccaatatcagccacccgcgcacctgctggaacaagggaagcaacacatgctagacgtgctgataagtgcttttcatccacaaaaatcattcctttatctatttaataaattaattataacaaaaagaggaagcaagatagcacccacttaggagtcctattcctacttccttctaatttacgcaagatggtctaaaaattcaccaattcgtttaatagcttctgttaggttttcatcagaggaggcatatgacagacgaacataaccatcgccacccttaccaaatgcactacctggtgttactccaacctttgcttctttagcaagctgctttgcaaaggcaacatcgtcagttccaaattgagctggaatcttagcaaaaaggtaaaatgccccttcaggagttaacatttcaaagcctaatttcttaagaccggcaacaagtaaatcgcgacgatgctggtaaatctttcgaaattctaatggatcatttaaaccatttgtcagtgcttcagccgctgcaacttgaacgttattagttacggttgtgactaagaaggcatgcatctttgaaatattagccatgatcttagccggagctgcaacatatcctaaacggtaaccagtcattgcgtgagattttgagagtccagagataaaaattgtccgctctggaatcatagtagcaattgaatagtgctctaccccatagactagttcgctatagatttcatcagcaatcgcatataaatgatgcttcttaattacttcagctaatcctgctagaacttcttgaggatattcacgaccagttgggttacttgggtagttaaggataacggctttgacgccttttccctcttcttcaagaacttcttcaagcttttctggagttagaacaaaattatctgctgaagtatcaacctgaacaactgttgctcctgtcatttcaattaatgggaaatatagagagaaaatcggggtcggaaccacaactttgtctccagtattaaggattgcaaataaagttgcatcgagggcttcggttgctcccacagtcgcaattatttccgtttgcgggtcatagtgcacatcacgagtattctgaatataatcactgattgcttcaagtaattctggctttcccatttgaggagcatagtgagaatcatcttcctcaatacttctaatggctgcttgcttaacgtgttcaggagttgccatgtctggttctcctaatgttaatttaataattcctgggatctttgaaacttctttattgaattcacggatacctgatggctgtaatgcatctaacttgtgactaacagttccatataaatcagcagataattctggcattgttcgatctctcctcaatttttatttataatagatttaaaaaacgctttataaaaattttacccgaacaatcaaatgttttcaatataaaaataagatttctctcatttattttaaataaaattaaaaagtagcttaagataattaattaacttaaactactttttttagtgtaaatccgtcttttttacgtatatatattaaatggagaatatttttattctaagaaatcttttaattgcttagaacgtgatgggtgacgtaatttccgaagcgccttagcttcaatctgacgaatccgttcccgcgttaccccgaagacttttccgacttcttcaagggtccgtgtccgaccatcatctaaaccaaaacgaagccgcagaacattttcttcacgatcggttaacgtatccagcacattttcaagttgcttcttcatcatttcataagcagcatggtcagctggacttgttgcatcttgatcttcaataaagtcccctaaatgagaatcatcctcttcaccaataggcgtttcaagtgaaactggttcttgggcaattttaagaatattccgtactttttcagttggcatatccatttctgcaccaatttcttcgggtaacggctcacgtcctaaatcttgaagtaattgccgttgaatccggatcaatttattaatagtttcaaccatatgaaccggaatccgaattgtccgtgcttggtcagcaattgcccgtgtaatagcctgacgaatccaccaggtagcataagtagagaacttaaatcctcgccggtaatcgaatttttcaacggctttcataagtcccatgttaccttcctggattaagtcaagaaactgcattccacggccaacataacgctttgcaattgaaacaactaaccgtaagttagcctcagctaattcttgtttagctacttcatcacctttttcaatccgtaaagcaagctgaacttcttcatcagccgtcaaaagatttacacgaccaatttccttcaaatacatccgcacaggatcattaattttaactccagttggagctgatgtatccttcatagcagattgtgagaatttttcagtagcctttaaagcacgaggatctggatccccattttcatcgacaacactaattccggcatcttcaatatttgaagtaaattgtcaatcccatcagcgttcaattcaaatggtttagcaattttagtagttaattcatcgtactcaatctgcttttgcttcttgtaattacgaattaacttaccaactgcggtgtcatattcttgttggtcaaaattggcgctgttagaaataacaatgtctttttttttgctttttgccatattaattagtctcctccgtttttaagcgttgctgctgctttaataattttaccagttcaatcgttaattgcgtagctaattctgtattatgcaatgaattagcttcttttaactgggcttgcttatctgcaatttgcgcagctaacggtgtttgttctacgatcatatggatacaatcatcaattgctcgcatatcaacttcttggtcaacatttaaattctcaatttgcccaagagtaccttgtaaactactttcatctaaataatcaagaaagtcagcagttgaatacgagccattttcagaaaaataacttgctgctaataaatacaaagtttgatatttctcatgtgcaaaatgaaaattgtgatctgctgtcacatgcatccatacttcacgatcatatagcatgtaccttaataagatctgttccgctaattcagtcctactaagtttaattttttgctgttcttcttcactagtttgttgaaactgttgatgacgagctagtgaaggctgttgcttaatccatggctgattatgaattcctagttgttgtcgcaattgatctaactgcgtttttaaggtttgtcgatctaacttgaactcacctgccaaccgttgcaagtacatatcttcttctaagggagcttgaacctgagcaattaccttcagcgctttggttaagatattgcattagttcattctgattatctaaatttttcccatttcttaaaaagtgcaggtaaaattctgttgttgtttcttccttattcgtaagataggcattgaattgctgtggtccatacttttgaacatattcatctggatcgatcccagccggcaattggacaacctttacctgcaactgattaggtcgatgatcattaacgaggctaattgcacggtcaattgcattttgtcccggttgatctccatcgtagcaaatgtctaattgcctagttgctcgaccaataatcgctacttgctcttcggtaaaactagttcccattgaagcgattccattttcgatccctgcagcaaaggccgagattacatccataaatccctcaaataagtataatcgaccatctttacgtgccgcttttcgtgcaacatcaaaattaaataatgttcgccgtttattgaaaatcggtgtctcaggactatttaaatatttgggtaaatttgttttactggtatcaattaatcgcccagaaaaagcaattacctgcccttgaccattttttattggatacattatccgttcaataaaccggtctcgcaactctccttgttgatcttcactaaaaagtccactttttcttagcaattggtaatcaactttttgctgttggaagaaaggcttcaagattcgctgatcaggagcatagcctaaaccaaattgttcaatcagctcctcactcattccccgtttttttaaataattaagtgcaacttgcccagccgtgtatttaccaatatatggtgataaagtttagccgctttatcatgaagatcaaacagctgtcgattctcgtttttaatggtttagccggaacgctaacatattgttcaggaattgatattactatcgttagcgatctccttaactgcatcgacaaaatcgatatgctttaactccatcaaaaattgaaatacatttccgctccggtgacatccaaaacaatagaaaaattgtttttcctcattcaccgaaaaagagggggtcttttcatcatgaaagggacataacccaattagattttttccagcctgatgcagttggacatagcgcccaattacatcaccaatatcaactgaatttcgtatttcatcaattacattacgcggtatctttgccattgatccacctcacttagtaagcgaacagcaacgaaatgaaaggtcgcaacctaacggaatgcgacctccacctatttttacatttaactagtatctataataccacaagttagcagcaatacaattaaaacgtcttattttacaatcaagttatccaagttaccaattaatgatgcttgattagccaaaatacttaattgggccaaacgattattacgaatatcttcattcttatccataatcatattttcatcaaaattcactaattattggtgttaaagtccgtaaggctgcaaagttttcacttactgtctgttgattttccttaatcaattctgaaacagcagtatgcatcttagcctcagatgggttctcaaataaattaggatctactacaagctcactaactggacgtttatccttctttgcaatccgtaatacccgggtaagagcttcaatatcttctttaaagttatcatcatccttatgatcatcaatagtttgaatagcttcaaggatattagcaatatcattttgacgagtatcggtagctgcatcaatgatatcgtgacgaaccttttgaccatggaataattgcttaatccggtccaagaagaacgaacggacttcatcactatttttattcaaatcaaaagaaacattgatttcagcgttttcaaaggcaggggcaatttctgattgaatacttaataatggaaggttccaaccacgatcggcgatgatccggacaattccaaatgcctgccgacgtaaagcataagggtcatttgaaccgcttggaatcatatcaactgcaaagaagctcatgatactgtcaagtttatcggcaattgctaagaccgcgccaatcttagtttgtggcaattctccttctgcagagattggcatgtagtgttcacgaatagctgtggcaacatcatctttttcaccgaatagcttagcataaatttcacccataattccttgcaactctgcgaattcacccaccatttgcgtagtaaggtcaaatttataaatatgtgctgctcgatcaaggtctactagttcttcatctgaaagatttagttgcttaccaagaacattcgcaatcactgcgacccgctgcattttgtcatacattgaactaatcttatcatggaagctaactttcttaagtcgttccacatattcatcaattgtcaacttctgatcttcttgatagaagaattgagcatcttcaagacgaggaacaagaacccgttcatttcctttaataacattatcaaggtagtctgtgttaccgttgcgaacagaaataaagtgcgataagaggttaccatctttatcccgtacacagaagaatcgttggttatccttcatggaggtaattaggaccgggtcaggtaatgctaagtacttctcatcaaaagatccagcaaaggcagttggccattcaactaggttattaacttcttctagtaagtcctcatcccaatcaacttgccagttgttctcattaataatcttagtaatttgatccttaattaaattctttcgctttgtttgatcagcaataacgaaatcattatttaaggtttcctcataatcatcagccttagcaattttaactggatggcctaagaaccggtgaccttgtgtttctcgaccagcttcaacgtccaaaatattaaatggaacgacttcatcatttaataatgaaactagccaccgaatcggacgaataaattgcaagttattgtagccccacttcatcaaggttgggaatgtcatcgaagtaataactgctggtaatccttgaagaacttcagcaacagtttttccagcaatatgcttttcaacaaaaacatattcaacgccttttacttctttgaattcaatatcttcaacagaggcaccttgtccccgggtaaaaccaattgcagctttggtccaattaccatcagcatcttgcgcaatcttttttgcagggcccttaactgattcatcaatatcaggttgcttatcacttaagccatggattagtaatgccatccgtcgtggagtagcgaattcttgaatatcatcaaaagtaatccgttgttctttaaggtacttttctactcgttcgtgtaactgtttaatacttggtgttacaacgtgagcaggcatttcttcaacaccgacttctaataagtatgtatttgccatcttacttttcccccttttgtgctttcttagctgcttgctttgcggcccgttcctttgctttttccgctttttttgtatattcttcaactgtcttttggcgaactgcttcgtcatgaatcagtgggaagccacgtttacgccgctcttcaacaaaggcttttgcaattgattttgccataattcgaatacggtgaaggtaaccagcacgttcggtaaccgaaacagcaccacgcgcatctaacaagttaaaggtatgactacactttaaaacataatcataagctgggtgaactaatccaagcttaattaaacgtttagcttctttttcgtaatcattaaagtcttgtagaagcatatcttggttactttcttcaaacgcatacttagaatgttcatattcaggttcttggaagatatcaccatacagaacatcatccgcccactctaagtcataaaccgagtcaacattttgaatatattcagccaaccgttcaagtccataagtaacttcggcggccactgggctcattggcaactctccaacgacttggaagtaagtaaattgagtaacttccattccatcaagccaaacttcccaaccaacaccggcacagcccattgaagggttttcccagttatcttcaacaaaccggatatcatgctctaaaggatcaatccctaactttttcaaacttcctaagtataattcttgaatattatcaggagaaggcttcattaatacctggaattggtggtgttggtaaagccggtttgggttttcaccataacgaccatcagctggccgccgtgaaggttcaacataagccacattccatggttcaggaccaattgcccgcaagaaagtgtaaggactcattgtccccgcacccttttcgttatcataagcctgcatcaacatacagccttgatctgcccaatattgttccaatgtaaagataatatcttgcacggttaattttttcgtcatactttacttctcctttcaatgaaaaagtccctacagtatcaaataattgatactgtagggacgaagttaatcgcggttccaccctacttttttacatctctgtaaaacagcttagtttaagcggctgttagagtgccaaggataaataaactacaaggcttgcactatcccctgatcgctgatttggtttatccataatctctgtcattgccaatattcaattaaacacgctcttataatagaaaaatattttacaaatgtcaatcgttcattgataactttccgatattttgttcccacttaatcatttgtctaatgaaccgttttgccttcaagtttagtccaacctcgttatcataaagagtatccaagacttgttggagacgtcgtttagtagctggattaatccgaatagaattcaatttctgcaagttaattgtggcaaactgttggagataataaacagttttacggtcaaggtgaagacgatgttcatcaagtgaccagtgattctgacaaagcatccctccatattgttcagagaagtctaaagccagatcattgcggccacaaacaacacaccgatcccaaattggtgctacaccaaaagcaactaacagctgtgtttcaataatatttgtaattatttgctcatctaatcctttttcgattaagtctaaggctgcagcaacttgattaaaccagccaccaatacttcgaccgtcattaaaagcactgtcaactaatgccaaaatatacgtaacatatgcatttttgctaatgtcacttgcaatattcttgtattggctagtatcacttgctgtattaataaaacttaagccattttcatcaagcgagccaatgtatgtaccatgggtgaatggcaggatatcagcagtcatccgaaagccacgttttttagcattttttacaaaaaacattgccggcccaatcttatcagtgagcatttttactaataggtcgcgttcacgataatcctgtcggtacataatgatcccagtaaattgtgtggttacgcgtgccatgtaaccatcatccttttaatagtctttattccgataaccatagtcttttagcattgcagacttatcacgccagtcaggaacaacttttacccatagttgaagaaatactttgtcaccaagtaatttttcaatatcttgccgggccattgtcccaatctttttcagcatttttccacctttaccaataataattcccttttggccaggacgttcaacaataatattggccgagatatgaatatgattttcatcctcacgctttatcgatgttacatcaacagctactgaatgcggcacttcttgtctcgtcagcaaaaagaccttttcacggatcatttctgcaatcacaaaacgttcagggtggtcacttacttgatcggctgggtagtattgcggaccattgggaagaatcttaataatatcattgattaagttattcacattatttccctgcaaagccgaaattggtacaatccccttaaatggaagggtatctttatactgatcaacaatttcaggcagatcattgggattgatttgatcgatcttattaacaactaaaaagattggctgattaactttctttaagcgttcaataataaagtcatcaccagggccgcgcttctcagtcgcactaacaacaaataagacagcatccacttcatctaatgctgacattgctgatttttccatgaaatcacctaatttagtagatggtttatgaattcctggcgtatcaataaaagtaatctgtgcttctgggcttgtataaattccttgaatcttattacgcgttgtctgtgcaacattactcataattgctaccttttgcccgacaacataattcaataaagttgattttccaacgtttgggcgcccaataattgccacaaagccagacttataattgggattatccatattaaaacttcctatctaataattgctaatatacggggaataaaaataattagacccaccaaaaccgaaaatatcgctgaaatcagtacgccaccagcagcaacatctttagctttttttacatttaattcataatggtgatcaacaatcaaatctgtaacagcttcggtaaccgtattaagaaattcagatgtaaaaacaacaaagattgctaataaaatccataaccattccattgctgaaatctgcaataaggccgacataataatggccaagcaggcagctaaaagatgataccgcatattacgctcttcacgtaatacttggataattccatcgattgcgtgacacattgcttgaattaagtgatgatttttctcagtttgatgtttatcgcgtgagtccataaccgtctagtatctcccgttgtaatttaaacattttttcttcatctgccggctcttcatgatcatatccatttaagtgaagaaaaccatgaacagctaaaaatcctaactctcgatcaactgaatggcccaaaaactttgcttgttctgctaccttatcgatggaaataaataagtcaccaagattaacagggatttcagcggccatttggggatccataataattggtgtttcatctcccgcttcttctgcggcaaaacttaaaacatcagttgcccggtcaacattacgatactgggcatttaatttttttatctctggattatttacaaacgttaaagacatttctgtattttctgataaggaaagttctttagcagcatactgtaataagtcccttaccatctccaattgttcatttggaagctgtgctgttgtttgatcgaaaatttccaagtccatcatttttcctcttttgtctctttatctttatctttttctgctaatcgctttgatgtttggtcctcataagcagtaataatccgtgctacaaccgggtgacgaacaacatcttctgcactaaatttaacaaacttaattgacttaatattattcaaaattcgttgcgcgtttacaagaccactgcgagtcccatgtggaaggtcaatttgtgaaacatcaccattaataaccatttttgagccaaatcctaaacgggtaaggaacatcttcatctgggcattagtcgtattttgggcttcatctaaaattacaaaagctccatcaagagttcgtccacgcatataagcaaggggtgcaatttcgataattcctcgatcgattaaccgctgtgtatgatcagccccaaaaatatcatttaaggcatcataaattggtcgtaaataaggatctactttttcacgaaggtcaccgggtaagaatcctagactttcaccagcttcaactgctggtcgcgtcaagataatccgttccacttcgccacgctttaaggatgccacggccattgcgactgctaggtaagttttccctgttccggcagggccaatcccaaacgtaatatcattatgcttcattgcgttaacatactgccgctgaccaaaattttttacccgaatggctcttccccggcgatctttaataatcgtttcactgtagaggtcagcaaaatattccagtgttccacgatgcgccatcttcatcgcactaacaatatctgtactgtggatgcggatcccttggtttagcaacgaaataagggcacgaaatacatcgatcgtaagtttaacgtcttcttcttgtccacttactttaagattttcaccgaatggtcggatttcaacatccattccttgttcaatcaggctcacaaacttatcctgtgttcctagtaagccaacttctatttctggactttcaatttgaaaagtttgttcaatcgttttttgttctcccacctatacaatctcctttaatttagcagattttatttaatgataattatatcatagatcacctttaacctcatcactgcaagcttttctaagggatctaagttatttttcaaaattaactttaactacttccccactattaaaagttttcgtttttccgtctgccaggcgaattgttaacgcaccatcattttcgatttttttagcagttccagcaataacctcaccatttactaccaagtccaccttctgtcctaaaatcattgagtcttggcgatattgctcaagatactgtggattatcatagtctaaataattattagcaatcgtctcaataagacggctgactaaaagattacgatctgctggtgctattcctgtcgctttatttttaaggcccagcggaaattcttttgtagttatattcaaaccaattcctaccactaaggatgccgttgttcttaattcaaggtctactactgcctcggtcaaaattccaccgacttttttatggtttaaataaatatcgttgacccatttgtaccgaaagtcttgagcagggaaaaattgtttaagaacttccacaattaaaactgcaaaagtcgttgtcattaacccagcttgtagtggtctgtcggttgggctaggcagaatcatactaaagtacaagccagttgctgccggagagtaaaaggaccgtccctgtcttccatagccagcagtttgatgatcagcgataaataccgttggcgcactaacttggtggtgactcaaaaaagctttcgcgatgctttgagttgaactaacctgattttcaacgtaaagacgattcttaaagtgattatgagtataaaaatcaataatatcagcactcaaccttgaatttccggtaaaacggtatccaaggtttctacgactttcaatattatttccgttttttcgtaaaccgttgatggccttccaaacagattcacgactaatattaaatcgctttgctaaatcatttccagaaatccatgaatctggtgctgaaagtaattgccataaaattttctgtgccgtcgaatgaaccattctaaccatcttcttaacaaaaaaccttaatgtgtcgtaaacggcgagtaattgagacggcaataagcgctttgattgtatcgccaaaaacaaataaaacattggaagccaaggcagaaataagcgtggtatgtaattgattagctaaccagattgcgccgactccttccacaaagattacaccccatagccaaacaattagaaattcagttatcccctgtgtcatcccataatgccaacttaattttagactaaaaccaatcaacaatgggacaaataaccaagcaaaaatatatccgccagttggacctaatattgtcaccattccaccgcgtccaccagaaagcagtggcaatccaagcacaactaaaaacaagaagagccatacagcaaatgttcctaatcttggtccaagtaattctccagcaattattattcccatattttgtaaaacaattggcaccggaataacccccaccggaattcccgggactgctcctaaaataacaataattgcaatcatcatggcaacgacagtcatttcataaattgataaacttatcttttccctaatcatcagcgtaaatcctttctttttgcattaattatattcaatagtaaacctcgattcaatataagggttactattgagtaaaaaaattgaggctaatcactttcgatagcctctttttacgaatattgttacgatatcgtggaaattaattaccttctaaaattttcttagcatctctaatttgttgacaaacttgatcaaaaccagttccaccataagaattccgccgttcaactgctactttaggttgtaagcaggtataaacatcttcttcaattttgggcgaaatctttttatattcgtctaatggaatatcaacaagatttgtccctgtcttaagtcccttcagtactagctcaccgacaatctcatgcgcttccctaaacggaattcctttagtagcgagataatctgctaattcagtggcattagaaaagtcatgatgagttgcatgctccatggcttctttctttacttgaagggtggcaatcatcccggtcatgatcttgatgcttgggagaatcgtctttaccgcgtcgaataatccttccttatcttcttgcatatccttgttataagcaagcggaagtcccttcattgtcgttaataagccgaaaagatcaccataaactcgcccaactttaccacgaatcaattctgccatatcagggttcttcttttggggcataatcgaactaccagtagaatatgaatctgccaattctaaatagccaaattcataactacaccaataaatcagttcttcacataatcgtgacaagtgcatcatcaaaatacttgcgttacttaaaaattcaagggcaaaatcccgatcagaaacggcgtccagtgaattatggtatggttcagcaaaacctaaatactttgcacttaattgtcgatcaattgggaaagtggtcccagctaaagcagccgctcctaggggtgataaatccgtgtgctgctggttaaattcaaaacgttcaacatctcgctgaaacatttggaaataagccatgagatagtgcccatacgaaattggctgagcatgttgcatatgagtgtaccctggcataatcgtttcaacattttttgctgctttatctactaattctgcctgtaagtttttcaattcattaatgataatgggcaaccgcttctttacatataaatgaaggtcagttgcaacttgatcatttctgctccgcccagtatgaagcttaccagcaacggggccaatttcttctgtcagcaatgcctcaatattcatatgaatgtcttcattgtcaatcgaaaatgggaggccttcactagttaatcgctcacgtaacttcttaagtccagcaataatcttatcagcatcatctgctgataaaatttgtgtttctttcagcatttttacatgggctaatgagccttcaatatcttcttgagccatttcttgatcaaaactgattgacgcattaaattggttaactagttggtcaccggcttcttcaaaccgtccaccccacattctcttaataggcatcgcttgtattctcctttactttctttttatttttgttttgtacttgagcatagaccttatctggtaattcccaaagtttaataaagccagtggcagcttcttggtcaaattcatcagcggaagtgtaagttgccaagttcttatcataaagtgaatttggtgatttccgaccttcacagattacatttcccttaaataatttaacccttaccactccattaacaactgcttgtgattcatcaataaaagcaactaaagatttcattaatggtgaataccaaagcccattataaataatttcactcattttttgttcaattaggggtttaaagtgcgctacttcccgttcttgggtcaggtcttccaagtctttatgggctgccaataaaacagttgcagctgggcattcataaatttcccgtgacttaataccaacaagtcggttttcaacgtgatcaatccgaccaatcccatgactaccagctaatttgtccagtttcataattaactggtcaagcggcatttcttcaccatcaattgctgtaggaaccccttcactaaaggcaatttcaattgtggttggggtatcaggggcttcttcaattgaaactgtccgatcatatgcatcagcaggtgccgcagcccatggatcttcaagaattccacattcatttgcccggccccataagttctcatcaatggaataaggactagcctttgtgattggaacaggaatgccattatccttagcgtattgaatttcttcttcccgtgaccagtgccaatcccgaattggatcttcaatcttcatatctggtgctaaagcatgaatacctgcttcaaaccgaacctgatcatttccctttccagtacaaccatgggcaatagcagtcgcaccgtattgattagcaactgcaactagtttttgaacgattaatggacgagaaagtgctgaaactaatgggtacttttgctcatacattgcatgggcttgaagggctggtaatacaaattgttcagcaaagtcccgcttggcatcaatcactactgacttccacgcaccaacttgaagacccttttccttaatcgcttcaaggtcttttccttcacccacatcaatacaacatgcaattacgtcataccccttatttttgagccatgcaattgcaactgaagtatctaaaccaccagaataagctaaaacaattttttcttttgacataatctcgtcctccatctcatttgaaattcgttgtttataaatatacgagtattatgaataaaaatcaatagttttagcatattttttcaaaaaatatctttttatgcataaaatataagttgttcatgcataaaaagagtttagagatagaataattatttaattttgttggttaataatttgtttattttgaactggataggtaattaattctgatgcttcaaggtcttccttatgcatatcaactgcattaatttgactgttttcgtaagtcttgtagtaaaaaatacccttctttaggtttgaaccatcagagtaaatcgtatattcaaaagtatccggtgctacttcatccaatcccttttgttgttcgacagattgaagaatgtggaaatagttggtaatgttctcaacttcagaattaccaactggggcatgcatcttagtgaatgtagccttaacaaaacgactttcagaatccattcctcccgggagaaaatgggtccctaagccccggctataaactggtaggtcgacattaggtgcaaatacgttagccggattagcaggtgcaacactacgatagttactaagatttaataattgacgaggaaactccggattatttgtcaaaacaccaactgggttatcataaacattcaatccttttgcggtggattcaacagtcacagaagcccccgttttatcagcaataatccagtgcagcggtgcagcttggagtttatcagaaaaattgatattagcaatgtttgcatttgaaagtaacttcttcgcttcagcaaccgaggaagcagccgcaagaatataaggaactaattcaaatgatgcaatattatcttttccttcttgaactgggaaataatgagctggaccatcaaaattaaggcctgccattccaacacccttttcatttaccccatcaaaatataatggataatcatcacgaacaatcgacattccaataattgcataatggtgttcaaggtttggcatttcccgaaattctaaagtcttattacgtggagtaatcactacttcttgaccaagattaacttccaaatcaaggttacggccaaagtaataatcacctgctgtataaattactgatgtgcacatataaatgccccttttcttttgaatatgccttaattctagtttaaaaagtaaaaatgtacagtaaaaagggactgtgacataagttaagttactttcataaaaagcaaatacgcagtacaacaatggcctctaacgtccggcaaaaccgatcgttagaggcctattgttgcttgcgggggctcccagaggctagcttcgcatcgaaaaacgaagtcacaagtgacttctgtctcgctccctttcctacgattagtcaagaaaaatatttagaaaagaagagtatactaaaccaacccggttcttcttcaaaaatcgagaattagtggtatattaaaattgtgaggtggttatgccttcacagggactattgagtccgtataccgatagtggtattttttatggtgcttaatcatggataagagacatttcagagttttattcatacaagctaccatggcgaccttgttcagttttggacgaggtcgtttttcttttaaacgatagtaatagtcaacaatatgattagaattagcgtgttgttggcggatcatattacctacagtaaaatataagagcttacgggcaatcgggtttccacgcttattaatatgatcttgacctaaataggttccagattggtaacgacgaatatcaattccaacaaaggcattaagctgattagcattgtcaaagcgactaatgtcgcccaattctcccattaactgagccgcagtttgtttcccaattcccggaaaagagcagtataggatatactctggtaagcgctgggcaatagattccatccgcttgatgacctcttcctttttacgggttaaggcaattaattggcgagcgtagtagcgaacttcatcaacctgaatggtatcaccagaaacagccggatatgatttttgggcgagatcgattaatcgatcggcatacttataagctttcatcttagatattcgtttatctgtagaggccattagaatattctttaatttaactctcgaataaggcctaactagtgctggatgaggaaaaagctccacgatattcaacgctaatttagatgttctatttacaaataattgcttaagttctggaaaaacttgttcaagtgcagtatgaagatgatttagacgatagttccaatcagcattgagctgattataaaaccgactaagctcatgtaactgaagatagtcttttttccaaggaactgttaatcgaaaagcattttcctggacagtgagcgcaatccgatgagcgtctttctgatcggtcttaactcgtcgtagactctcggactttaaatgaagttctagtggattaagacggcaaaagcggagaccattagtctcacagaaatgtccaattactcgcgaataaattccagtcgcttcaaagtagataattggcttctgagcttttttaatcatatctcgtagagcattaaaccccgctttcgtgtgtactaaagaaaactcctttaaacagtgtttccctcgataccagacacagtagcttttcctcattgaaacatccaaggcaaatatatcagacataaaaagacttcctttttataaatagagctagatataaccgctatcctagatttgtacttcatttcctaaatactcgaactcgtagttccacaacctaaaagcaaaatatcaaatcaaagatagcggagatcattttataatacggactcgaagtccctgggagcatgatcgatcttagctctatcttcagaataacaaaaaagtccaggacaataattatttttgtcctgaactaatcttaggttgttttacagctaatattacttactcaattgttcttttacaacctggttaactaattttccatctgcttgaccttgaactttgggcataactgaccccattacttgtccgaagttcttcatactagaagcattaagctcatcaattacttccttaacaatcttagtaacttcatcttttgataactgctttggcatatacttttcaacaattgctaattcatttttagcttggttgatcagatcttctcgtccagctttttcaaattcttcaagcgattctttacgctgtttatattcacgtgctattaccgcaatttcttcattagcgctcaaatcgtggccaagttcaatttgttcattttgaactgctgctttaagcatccggacaacgtttaatgtttccttatcacgattcttcattgctgataccatgtctgacgttaattgttgtagtaagctcattatttatccttctttcatataaaaaagctctcaccaggcaacaggtgagagcacacatttttagtaacgacgaccgcgcttattcttacgcttccgtgccgcttcagatttcaacttgcgttttacacttggcttttcgtaaaattcacgtttacgatattcttgcaatgttccgttacgtgaaactgaacgtttaaagcgtcgaagagcgtcgtctaaagattcattcttacgaacgactgtttttgacatgttgatccctccctccgagcttaaagttacgtatcgaggtagcaggcatactgcttccttttcactacaaaaattattttacccaacatggcctaccctgtcaacattacttttaaataaaaatttaaatttcttatccacctattctttgactactccataaactaagtaaccgcttttaattattatacaaatatatgaatatttattcttttcatagattttctattgcataaataaacatttaagtgtatatttagtaacaatttaatcttactattctcaaaggagttattaactatgaaaggttttaaacatttattactgctaatggtaattgcgtttccgatattatgtacacctattactgcattagctgctaacgagagcagttcaactagctcttcatcaaccaataatccatcgcaagtcgctagcaatgattcagtgcaaaagattaaacaaaaaggaacattggttgtgggaatgagtgctgattatccaccctacgaattcacaaccaaagaaaatggaaaaactaaatatgtcggttttgaagtttcccttgctaaacaatttgctaaagacttaggagtaaaactagttattaaaaacatggactttgactcacttctagttgcgctagaaacaggtaaaattgatgctattatttcgggaatgaacgttacggctgaacgaaaaaagagcgttgacttctcaaatacatattattccggtgatagttactttttaattaataaaggagataaagataagctagttaatgtcaaaagttttaatgggaaaaatgtgggagcacaaaacggtacgctccaatcaaccctaatttcaaaggaaatgcctaaagcaaacggcaaagggcttgctaaactttcttccttagtcattgggcttcaatctcataaatacgatgggattttaatggatgctgcaactgctaaagcctacgctgccaataattcaaatctttatgcctttaattcgaaattgccaaatactgctggcggaattgccatggcctttcctaaaggtgatacctcgttagtcaatgccgccaaccagacaattaaaaaagttaataaagaacaactaattaataaaaaatggattcctgaagcctcacagtatatgaagagctataaaaaacaaaatactgttcttagctattggcgttactttgctaaagggattaaatatacattaatcattacagttgtctctgttatttttggtttcctattaggaactctctttgcactaatgcggctttcaaagaacaaattcttacattcaattgctgtttgctacattgaatttcttcggggtacgccaatgatggttcaaataatgtttgtttactttgggattggcgcaattattcaatcacttccggctctcctcgctgggattattgccgtttcactaaattccggtgcctacgttgctgaaattattcgttctgggatccaatccattccacttggacaaacagaagctgctcgaagcttggggatgagtaaaagcgaaacattcagatatgtgattatgccccaagcacttaaaaatatttggccagcattaggaaatgagcttattactttattaaaagatagttcattagtttctgtgattggtgtttccgaattgatgtatcaaacacaattagttcaatcagcaacttataaaggagttttacctttattcatcacaatgatcatctactttatcctcacatttacactatccaggattttgctttactttgaagggagaatgaaacatgcccactaaaatgattgaaattaaaaatttacagaaaaaattcaaaaataatattgtcttaaaagatatttccgaacatgttgataagggccaagtaatttgtgtgattggcccttcaggagcaggtaaaagtacttttctccgctgcttaaatgcactcgaacaaccaacaagcggacaagttctttttgaaggacagaatctgattggcttaagtgataaaaaactcgaccaattgcgagaaaagatgggaatggtttttcaaagcttcaatctttttcctaatatgacagtccttaaaaatatcacaattgcaccagttaaagttaaaaatatcaatgaaaaagaagcaactaaaactgcaatggaactactagaaaaagttggtttaagcgataaggctcaacaatatccggatcaactatcaggagggcaaaaacaacgggttgcaattgcccgggcccttgcgatgagtccagcagtaatgctctttgacgaaccaacgagtgcccttgatcctgaaatggttgatgaggtactaaaagtaatgcgcgatttagctgaatcgggaatgacaatggtggttgttactcatgagatggggtttgctcgtgaagtagcagaccaaatctggttcatggcagatgggtatattcaggaaactggagatccagaggaattttttgcccaccctactagcccccgggcacaagactttttgaagaagattttgaaataaaataatcctcgtgaacagtacacttcaagtaccttttcacgaggattatttttgttttatttattgctcatctggatcttgatcgagcttgtaatcaattttttcatcaaattcaattttaagatcatcaagttgttgttcactaactttgcctggagctgccgttaatggttcaactgccttcgagttcttagggaatggaataacatcccgaatactatcagcttgagctagtaacataacccatcggtccaaaccaaaggcaagtcctccctcaggtggcattcccattgttaaggccttaagtaagaatccaaagcgagcctctgcacgttcctttgtatatccaagagctttgagaactttttcttgaatctttggatcgtggatacgaattgatcccccaccgatctcgttaccattcaagataatatcgtaactttgagcatgagctttatgaggatcttccccatcttcaagataatgtaagtcttcttcatttagcattgtaaatgggtggtgagcggcaatccactttccaaagccttcatcatattcaaacattggccaattaacaacccataagtagttccattggtcaggcttaatcatatctagctcttcagcgattgtacgacgaaggtagccaagtgaatctgatacaacgtggaaactaccagcaacaaagaggattaagtccccttctttggcatccatttcttcattgatttgggcaacttgatcatttaagaacttagcaactggaccattgtaaccatcagcagttaccttaacccatgcaagtccctttgcaccaaaacgcttaatgtattcttcatacttagaaatatctttccgggaatacttatctgctccaccaggaacgcgaattgcacgaacatagttaccatcagcaacagtattagcaaaaaccttaaatgaactgtcttttacaatatcagaaagatcatgaatcaacatcccaaaacgagtatccggcttatcggaaccgtacttgtccatggcttcttgccattccatccgtgggaatggagtcttaacatctaccccacgatttccttcattacccgcttaattaaaccttctgtaactgtttggatgtcttcaggagttgcaaaactcatttcagtatcgatttgcgtaaattctggttgacggtcaccacgaaggtcttcatcccggaaacaacgtgctaattgatagtacttatcaactccggctgccattaacaattgcttaaataattgtggtgattgtggtaaagcatagaaatgaccggggtaaacacgtgatggaacaatgtagtcacgtgctccttctggtgttgaccgtgttaaatcaggggtttcaacatccataaagccttcattatcatagtaattgtgcacaatcgaagcaaccttactccgcaacttcaaattacgcatcatttctgggcgccgtaaatcaaggtaacggtacttcatccgtaagtcttcagaagcatcaacaccatcagtaatatcaaatggcgttgtttctgattttgctaataccttaaccttatcaacggctacttcaacttttccagtcttcatatctggattaatttctttttctgcccgtaattgaacttttccttgaacctcaagaacatattggttacgaaccgcatttgcgatttcaaatgcttctggattttctttttcgttgaatactagttgaacaattccttcccgatcccataaatcaataaagataagtccacctaggttacgacgcttagctacccaaccctttaagacaacttcttgtccaacttgctgttcatttgtatccccagcataatttgttctcttcattctccgcttacctctttcagtttttaataacagtttaaataaaaagcacccttgaaattacaagggtgcaaatgcacggtaccaccttggtatcactcaaaaataacgtctaaacgacggagcatattgcccagcttcaaaagtgtcaatcgaggccaaaatatttggagctctcacctttctccaatcgctgataatttcaagtacccgagcattctttatcaacagctattaatatctttaatttacatttttaccttactcgatcccctcataaatgtcaatactaaggttaattaggtatctgtcaagttttcataggtagcctttaaatatacagttttagtgggttagtgccttaaaaagttgtcccattggtctacttgtggccgtgttaatcggaattattccttgtactgctccaattgacggctttgtcggtgcttttcttagaaactctccagttcgaatatgcatttcctgtaataggctggtttgagccactcgaggatgaactgttaattgttctaggattgtatttaaactagcttgcagttcaccattcattcgggcttcaattaaaccaatcatggctttagccccctgctcagtccatgacttgccctgtttcttcatccggtaagtaaaagcccggtgagaactttcgactgaaccaattaaatgaatatccttaaatccacgcatttgtggtgagaggatataccgccaatttcgctgtagatactttcttaaacgcattaggtcgtctgcttgtttttccgttaggttttgtgattcataagtatctaaaattattgttagctctgcttgatcatgatgacgaacggctttaattgctcgcatggctaattcgttgtgccggcctaaagtatgttcaattttctgtaaacaatgatagcggtcgagaaagtattcaccatgtgcaccttgaggaactagacttaatagcttagctggttcgtaacctgggccagcgtcactgaccaaaaagatcgtttgaccggcaagcttataatggcggtctaaataatcacttagtcgtgcttcaagccgtccttggtgcccaacactgagaaagtcatgccgattaatgatttgattagctactcgctcataaaccctataatggtgcacaagagtcagctgacctgcttcttttttgcctttaatcataaaagcatcaccctcaatagttaaatttttaggcatatggcgaggagtagcttggtgttcttttgcttgagtttgtttagctacctgatttcctaactcatgcacggcgtgcattaccgaatcggtagtaattccgctgtcaaatacaaggttcaaaatgtcggcagtattgcgcattgtagttgtttgggcaatcttagccatcatcattaagtagtgtggcgataaacgacgacgtggtttaatttttaattgttggtctaagtaaaattcacgtttctttgtcccagcctgataataccgtcgttgaaaagtcaccgggccaaagataaagttaagcgtccgtggctgtttattgattacttgatagttcgctggagcttgggactttaagcttcgatctaagctttccaaaaagttttgcatgattacttgtcctaactccaataccccttttaaaataatctgttcagcttcaaataaactacctgatttcaccaaattctgctcgatttctgttaaaatatccatgaggaaagacctgcctttgcttagtattcgacacactaaaggctactggtcttttctttttttgtaaataagtaaattggtctacaaaaaagatttccacgaccagatgaattattcatccaacctatgaaaatcttacactaacgttaattagtgccttataaatcaactttatttaacaatacttgcctaaaaatggtataaataaagtaatttagtaaaggagggacatcaattggaaagtccaaatacagcatggtttaagcgccttccattaaaaaatctcacttctgttaaaccagtcagtggtggtgatattaatttagcatatcaaaccacaactactgatggaaataggtactttataaaggtccaacctaaccattcacaagattatttcagtcatgaaattaatggtctcaaagctatcggtaaggtcattaataccccaaccccactttaccatggtgaaatcgatgggaatgcctatttaattttaaactggcttgatgaaacttggggtaatcaggccgacctgggattagcagttgccaaaatgcaccaacagcataatgaagaattcggctttatggataatcatcaaaccaaggccctcgtaaaagataattcttggaattcaagctggcttgatttttatattaatcagcgcctagaaccagaagtacaagtggcaagccaacgtggccgatggaataaatggcgacaagaacattaccaacaaatggttaataaatttactgattactaccaacaccatgaagtcatccctagtcttcttcatggtgatttatgggccggtaacttcttatttgctggcgatcataaaccatacttaatcgatccagatgcattatttggggatcgtgaatttgatttagctatgacaactgtttttggcggtttcgataatagtttttatcaggcatatagcagcgtctttccctttgatgatcatttagaggaacgcctttcatggtatcgtttctattacctatgcatgcatttaatcttattcggcgagagctatggtggcgcagtcgatcaaattttaagtcaatactaaactgtgacataagttaagttactttcataaaaagcaaatacgcagtacaacaatggcctctaatgtccggcaaaccgaacattagaggcctattgttgcttgcgggggctcccagaggctagcttcgtttttcgagccccctctttgcttttttagcgttcataaataattgtcgtggggccatcattttccagatcaattttcatcatggctccaaaatgtccggtttcaacaggaataccagtagcagctagtttttgattaaaaagatcatataacggttcagcaatctcaggacgagcagcctgtgaaaatccaggacgatttccatgcttagtgtcagcataaagggtaaattgggagactgataaaattgcaccattaacatcccgtagccccttattcatcttaccgttttcatcctcaaaaacacgaagattagtaatcttatgtactaagtagtctaatttttcttcggtatcatctggagcaaaaccgactaagagaaaatagccaaggccaattttaccaacaacttcatcatcaattgaaactgctgcatgatttactttttgtaaaacgactcgcacaagcatcctcctatcgaataattcttttgacaacgtaaacatctggaatgttttttaaaccatccatgattaattgcaactgtcgtaaattacgcactccgataatcaaactaattgttaccatcttgttatggtcaacttttccgttaactgaatttaagaagcgagtactgttatttactgaacgtaaaacatcatttaacaagccatttcgattgtatccctgaacttccaagtcagcattgtagtttgttttgtcgccattaggatttgcccaatatacactaacaattcgttcgccattcttacgggcagctttaatattcggacaatcatcccggtgaaccgatactccccgtccctttgtaatgtagccagtaatagcatctcctgggattggactacagcaatgacttaaacgaacaagaagattgtcaactccttcaacaattacgccctcgctcgatgccttagcctgtttttgcttttcacgttcatttggcttctcaagagtctggtgatcttctagtacagctttttctgctgcttgttggcggtcgctttcaacttgctgacggatatcagcagtaaaacgatttctaataccaacgggagccaagtcaccaaatcctagggccgcaaacatatcatcactactattgtaatgagtctcttgagcaacttcctcacatttttcatcagtcattaattctgctggcgaatatcctgcttcacggagttcgttttcaagaagttgttttccttcttcaatgttcttttctcgatcgtgtgcacggaagaattggcgaatcttattacgagctcgccgcgttgaaaccaaatcaaaccaatcacgactcggaccagctgatgatgatgaagtcaaaatatcaacaatatcaccatttttgatctcataatcaaggggtacaatccgtccatttactttagctccagttgtatgattaccaacttcagtatgaatttggtaagccatatcaagtggtccagatcccttaggcatttcaattacgtcacctttaggggtgaatgcatagaccttatcagtaaatatatcgctctgaatcccctgcataaattcatctgtgccttgactttcacttcgtaattcaaggatttctttgacgacatttagcttttggctatcctgagtttgttggattccattagtctttccttctttatatgcccagtgagcagcaaccccatattcagcaatttcatgcatcttgtgagttcgaatctgtacttctaatggccgtccttccggtccaataattgttgtatgcaaggattggtacccgttagtcttaggcattgcaatataatccttaaaccgtccaggcattggtttccaattagtatggatcgctccaagagcagcatagcagtcccggattgagtcaacgacaattcgaactgcaagaagatcatagatttggctaaattgcttatgctgagtaaccattttacggtagacagaataaatatgtttaggccggccataaatttcaacattcggtcctaagtccaaatctgcaatcgccttttttatcaacttaattgactcatcaatatagtcaacccgctgatcgcgccgtgaattcattaaatggacaatccggtaatattgttgcggatttaagtaccgtaatgatagatcttctagttcccacttaatagtactgatacccaagcgatccgcaattggagcataaatttcaagggtttcatttgagatgcggcgctgcttatcaggacgcaaatgcttaagagtgcgcatattatgaagacggtccgcaagcttgacaatcattacccgaatatcctttgacattgcaagtaataatttacgatgagtagcagccatttgttctttatttgatttgtaacgaatcttaccaagctttgtatcaccatcaacgatcattgcaatggttgatccaaagagttctttaatatcatctaaggttgcgccagtatcttctacaatatcatgtaaatatcctgcacaaactgtttcgggatccatatgaagattagcaaggatccccgcaacttggataggatgaataatatacggttccccagatttacgtcgttgatcatggtgagctacctcggcaaaatgatatgccttttcaactaaagcaacgtgttcttcattcatataagaactaactattttttgaacatcttcatgtgtcaattccttttcttttgacatcgaacgacctcctttcaattacttttgttgacgcattgcccaggataagtacgcaagcgctaagtaagcaagggcaaaataataagtatatcggggcataaagaaatacgcagttatcaagtaaaggattggaaaaatgaataactcgccccattttcgctggtgcttataaatccaataaccggaccaaatactaaaaataccattaataaggattaagacaatctctaccattaccactcgcgtaacaaatggaagcttatcaacaacgagcgtcaatacaatcccaattaaaatgctagctagccataatggtttatctaaacgttcccatgcttttttcataaaattcattctctttcaacacctatattcagttttaaatcaccgattaaagctgttctttattttaccataagtaagccagctacattatgacaattccattgcatatgagatagccgccatgaaatataaaggcgctgtttcagttcgtagaattcgtggtcctaaacctgctgctaccacgccagcttcattcattttagcaatttcattttccgttaatccaccttctggaccaaaaatggcaaggagcgagtctcccgggttaagggcattaaattgttgcgctaaagcacttgtttcaccctgtttagctgattcttcccaagcaactatccgtttggtagcgggataatcggctaacaattgatcaagatttgcactgtattcaacctgcggaattttatttcgatgggattgttctgctgctgattcagctattttttgcagacgttcgatctttcgtttctgcttatttccctgccaatgactaatggagcgagcagcatcgaagaaaacaattttgtctgcccccaattcagttgccttttgaacaattaattctggtttctctttagtctttggaattccgcaggcaagcgttaccgaaactggcaattcactatcagcatctaacttctgattgatttttaatgtcgccgttggttctgtagtactaagagtcgcaaggtaaacacagtggtcggctaatacaagctcaacacttgttccaacctctgcgcgcattacctttaacaagtggtgggctgcttcagatggcaatgttacttcattagctggagttacattaacaaaatagcgttgcatttatttcacctcgattggcttgtgggtaatcattccgtgccagtccttcatctgctgttcatcgtcaattataaatccttgctcttgcaacttttgacgaatcaacggagccttatcatcgataattccagaaacaaggaatttgccatctggcttaagattttcatatgcttgaggaataagaggtacgatgatttccgcaagcatattagcaacaatcaaatctgcctgggtatggatcccatctaataggctatttacgccaaccttaacatctttagcgaccgggtttagtgcaagattcttttttgctgagttgactgctacttcatcaatatcataagcatcaacttttcctgcccctaagtgcttggcagcaatacttaaaacaccagaacctgtcccgacatcgattacatattcattaccaacaactgttttttcaagggcctccagcattaaacgagtagttggatgagtcccggtaccaaaggccattcctggatcaagaaagattaatttttctttaggatctgctggctcatattcttcccattgcggaacaatcgttaactgatccgttactcttaatgggtgataatatttttgccaaaccgttgcccattgttgattatcgacgatcgctgctgagacatcattttctcctggattcaggccgtaatcccttaattttgctactcgttgatggatagttggcaatagttcaggaacaaatacgttttgggggaaatatccagatactgctgcgccattttttcggtgcggaattgatgatggatcaataaattcaccgtggtccccatactttccctcatgtaagtttgcaaaatcagcagcatcttcaatttgaacgccttgtgctcccatatctgtcaaaatatagctaactgcttcaacagcctcactagaagttattacctttattgctgtccaatccatttaatgacctccttaaataataaaatcgtgaccacaataaaagtaaatggtcacgataaataccaacttaataaagtctaatcattttcattatcaactttactaatatgtggtcgttcttgttcacgtttcttttctttttctaaatgatgacttaagtaatcgattaagtcggactcagtcaagaaaatacggggatgatgttggtgatgcaaccgaacatcaatctcgttaatttttaatcgtccggtccaagtatgggaataacgaacaattacccgattatttagtctgtgtttaccaaagcggaacacatatacgtgttggggtgtcatcattggccgaatgtactcttttttatacattaaatcattgtcgcgcataaactgcttagttcgattcagaatggtaaccacctcctctattattattcctgatcaattttaaattaatctccctagataggtatattttagcacaggtcaccaacgttccaaagtttaatctatgtttaaactttaattttcaaaaaaatgctatactatgttcacgatactttaaggaaaggtgattacaatagtgagtctcttaattgctattcttatctgctggttgctatggaagattgggggtttaacggttaagttcattggtctaatccttcttattctattaatcgggacattaattcatgttttactttggccagcgatccttttagcagttattatcttaggagcaggtttattcactaactaatttatctataaaatcttatagtaatttttctgcggaatgttataatcattactgtgagagaaatctcaaataatgtatacataagatgaaagggagactgtttattatgtctaagaatcatcaaaaagttgttcttgttggtgacggtgctgtcggttcaagttacgccttcgcaatggcacaacaaggaattgctgaagaatttgctatcgttgatattattaaggaacggactgaaggggacgcaatggaccttgaagacgctactgccttcaccgctcctaagaacatctactcagcagattacgacacttgcaaagacgctgatttagttgttattactgctggtgctccacaaaagcctggtgaaactcgtcttcaattagttgataagaacttgaagatcattaagtccgttgtagaaccaatcgttaagtctggttttgacggaatcttcttagttgcagctaacccagttgacatccttacctatgctgttcaaaagctttctggcttccctaagaacaaggttgttggttcaggtacttcacttgattccgcacgtcttcgggttgctcttggtaagaagcttgatgttgaccctcgtgatgttattgctaacattatgggtgaacatggtgattccgaatttgctgcttactcaagtgctactgttggtggcaagccattacttgacatcgctaaggatgaaggtatttcagaagatgaattacttaagattgaagatgatgttcgtaacaaggcatacgaaatcattaaccgcaaaggtgctaccttctatggtgttgccactgctttaatgcggatttcaaaggctattcttcgtgatgaaaattctgttctccctatcggtgccccaatgaacggtgaatacggacttaacgacctttacatcggtactccagctgttgttaatgcttctggtgttgcaaaggttattgaagttccacttaacgaccgtgaaaagaaggctatggccgactctgctaagcaattggaagaagttgctaagaacggtatggcaaagttacaaggtaacaactaagccgtattcataaataaaacgatagattatcgtgctactaaaaaactctcagcgtttagtaaaacgttgggagtttttttgcctatttttgatcattttttaagtcacgtgcaaaatcatcaagaaagtcttctattaatttatccttataacccttttttctaagttcactcgctaaaattgccgaagtaagcccctttcgaattgctaacttatgatcacctgcgagccaaaacattactaattctcgatcttccatttaaaatgctcctttttcctcatatattcagtgtaccactttcacttatcaggatttgaaggagtttatcaattattaaggaacatcaataccaagttcagttcctatttctttcatttcttgataggtcttttcatcaatcgtgacacctttttctttattttctgctaataaacggtactcacgatcaccgggtacccaaatttctttaccaggaatatgttcaagctggcgaattcgatctagcattgatgtggcatctttctttcaatacctctggatcaccaaagaatgctggattaagaaccattacaaattgactaaaatcatgtttaccactaacagtatcggcagagatagagccttgagctaaaatacccgtcaataattcaattacgatagaatttcccatccccttataattagaattttcctcatcatttccgccaagagtgagaactcctccacctttttgttccccttcagtaaaggccgcggtggcaagaatatcttctgcctcttgcgcatcagttactacctgccgatctttatcaactgcccattcgcctggcaacggttcgccttttttagcatgaacttgaatttttccacctgaaacaacacaagtggcaccatcaaacataaatggatgtggagaagcaggaaagccaaacgcaaaagcattagacccaagaaaagcctgagtagcattagttgggactaccaggggacgagtgttagtaagggcaactcctaccaatccagcttctaacgctaatcttgtatagtaaccagcggtgccgaagtgattcgaattgcgaataacagcaattgccacccctgttttcttagccttttcaattattttttgagtcgctaaaaccgttgcgagctgtcccatattttgattagcgtcaacaaggacggatcctggtaactcacgaataattttgaccttattttggggaataatcgttccctctttaatcatccgacgataccatgctaatcgttgaatcccatgagatgagatcccgcgtaaatccgcatcaactagagtgtctgctaataattgactgtcatcttggttaaatcccaattttgtaaaaacttctactagataatgccgttcatcggttgcttgaattctcctttttatccttctctcattttacattaattatattttaataataaagtgagaaatgtcaatattcaaaatatcttaaaggttaggatccatcttaaatgacatctttgaaagctcacagccttcagttaataattcaaagaagagggcctttgtccgttcattataatgggtagctatttcatgattttgcccagttagataatcagttaatgcctgcctttcaagactagctgcttctttatcaacctgcgcaattttacggcgtgcccattcatttagctccttttggtagtcttcatctttttccataaattcttgataatgactttcaacaacctctgctaaggcttcatttaaccagaatgcagactctaagttcattttttccggtacgtttcgatacgattcatcagtatcgtcagcattagcaaaaaatggaacataagggttaaaggctgggacccctaattcaatccaatgaatacttgttttatatttattcagattgcgcacttgtaaaatatgtgattgggccgtccgtgataaagagatagctcggtaagtcttacgttcaggagcatcccccattggatcgtaaggtgtctcattaaaatgcgattttagaacatattggatgtcttcattagcaatcttaaattcagccttacgaataaatggcatttcagaatcttcgggacgttggcctaatgaagcattaggactaaggtaacgttgagcaaaccaggtccgcggtgtgttgtaatgacggtctttttgtgtactggtaccaaaaatatgacggaaatcccaccggtcatggtcagggtttaattggtgttcttcaacaaattcttgaattccatcagcccacatataattatcaggatcgtcaaaatcgatatcttcaattgctacctggttaggagtaacagcataacaatcatcaggaatacgaactgcaacccattggtgaccagttactacttccatataccaaatatcatctgcatctgcaaattgcattccatttccctcagcagagcccaattcagcaattaattttccagtatattcaactccttcacgggcagaatgaatatacggtaatactaaagtacaaagtgagtcttctgccaggccattttttacgtatggatcatatgctaacacccgatcatttgcataaacactctcagtaaaggaagctgccacatttgcttcattaattccatcttcttcattaggtccggctgtttgatcaagggtaggcgtagaagtataacgcattctctcttccggcaaagctacagttactttattgtaaggtgatacgtaggtttcgtggcgtccttttactgccggttttactaaaaatcgcttgggttcaattgcttttacgcgatcttcattacgagcaatataattagcaccgtcgagagaagcctttttaccgaccataattgatgtacaagcatctttattttgcatatttatttcctcctcaaataatagcgattacattatctatgatacgctaatttggtgaggactgcagtattgagcgagtataaaaacccaccatgtttaatcgaatgatgaaaaaattaaatgagaatctgttaaatcgaggagagtccttgtattattatttatggggttaccttcttttctatgtgatttggcgatttcattgtatcagagggcgagcctcttttttagtttaaaaacaaaaaatctgatattggtatagaatgtaatatttctatatcaacaccagatattgtagaaccataacaaaaaaggatcagtacctctatttcttagggaatactgatccttaatttttaccacattttaagctcacgtggtaaaaattactagttttgtatattttttgttttatacaaagccaataaatacctttacatcaacgtttacttctcatccaattgctcatcggtcttcaaaacggccataaaggcggcctgaggaatatcaacttttccgacagccttcatccgtttcttcccacgtttctgcttatctaataatttagcacgccggtctggatcccctgtatgaatacgggcagtaacgtcttttcggtaggctttaatattggtccgggcaataatttttgagcctattgctgcttgaattgggatttcaaagttttgccgtggaataatcttctttaacttagcagtaatttcccgaccacgttctgccgcaaagtcacggtgagcaataaagctcaatgcatccaccttatcgccattgagcaagatgtcaatcttaaccaaattacttgaccggtaaccatcaatttcataatctaaggaagcgtatccccgtgtagaactctttaacttgtcaaagaagtcaaaaataatttctgacagcggaatatgataaataacgtttacccgggtatcacttagatattccatcgtatcaaagtctccccgtttacgttggcaaagctccattactgggccaacataatcattgggtaccatgattgaagcgcggacatatggttccttaatcgctttaatggaagaagcgtctggcatttcagctggattttccacttcttttgttgtcccatccgctaattcaacatggtaagtaacagatggtgcagttgtgattaaatcaagattaaattcacgttcaagtcgttcttgaataacgtccatgtgaagtaatcctaagaaaccacaacggaatccaaatcccaatgcttgcgatgattccggttcaaaggttaatgctgcatcattaagttgaagcttttccaacgcatcacgtaaatcattaaatttagcattatcagttggataaagtccagcatataccattggcgtcatttgccgatatccttctaacggcttatctgtaggattatctgcacttgtaaccgtatcaccgacccgagtatctttaatgtctttaattgccgcggtaatataacctacatccccagccatcaatacatcacgtgccaatggtttaggagagttaattcctacttcagcaacttcatattcggtaccaccgttcattaacttaattcggtcaccttttttaaccgttccttcaacaacccggacactaagaaccacgccccgataatcatcatactttgaatcaaagataagggcttttaacggcgcagttaaatctcctgttggtgctgggacatccttaacgattttttcaaggacttcatcaacgcccattccagtcttagcactaatatcaactgcctcatcagtatctaaaccaatctcgtcttcaatctgtttcttagtaccctcaggatcagcagaaggtaaatcgatcttattgataacaggtaagatctcaaggtcattgtcaagcgctaaaaagacgttagcaagggtctgtgcttctaccccttgcgttgcatcgaccactaagacggcaccttcacaggcagcaagagaccgtgatacttcataagaaaaatcgacgtggcctggtgtatcgattaaatggaaaatgtaatcttcaccgtctttagcatgatatgtcaaggcgacggcatttaatttgattgtaatgccccgttcacgttctagaggcatatcatcaagaatctggtttttcatttcacgtttgctgattgaatcagtcatttctaaaatacgatcagcaagcgttgattttccatggtcaatgtgggcaacaattgagaaattccgaatgtgtttttgccgctctttcatttcttctaggttcatttaaaaagactcactttcaacgaatattctttatctagtataccaaatcctcgtttagaatgggaaaccttctactagatatacaaaaagcaggaaaaatattaagcttttcctgcttcataaaaattatttacttatcctcaaaggcatcacgtaacttatcaagaactgtcttcttcacacccttaacatcttcaccactagcagccgcaaaagctaacattgcttcacgctgacgcttgttaaggctcttaggtgtcttaacatggacagtaacatgttcatctccgttaccattaccgttaaggtgtggaacccctttgccacgcaagcggaaattagtttctgattgggttcccgcaggaatcttaaggttaacatcaccatgaaccgttttaacttttacttcatctcccaaggctgcttgagcaaacgaaatatcacgatcaacgtaaattgttgaaccgtcacgacggaattcacgacttggtgttacccggaagacaatatacaaatctccggctgggccaccattctcaccagcgtctccttggtgttggagccgcatttgttgaccatcatcaacaccggcaggcaccttcacttctagctcatgacgttcgtgaatatgtcctgcaccatggcaagtatcacaacgatcttctggcttaataatctttccagttccattacattctggacaagtggtttgagtttgcatattgcctagtggtgtttgacgaacactcgtaatcacgccggcaccatgacaccgtggacaagttattggcgatttaccaggctttgctccggttccatgacaagtcttacattctgcatcacggttatacttgatagtagttgttttaccaaaaaccgcatccataaaatcaagagtcattgcatattgtaaatcacgtccttgacgcggggctgttgggtcccgacgagtacgaccaccgccaccaaagaattgactaaagatgtcgtcaaagccgccgccaaagttagaataagcttgaccaccaccaaagccgccaaagccttgaccgccagcaccttgtgggccagctgaaccaaattgatcatattgagcacgtttttggctatcacttaatgtctcatatgcttcattaatcttcttaaacttttcttctgcaccaggctcgtggttaacatctgggtggtattttgccgcaagccgacgatatgcacgcttgatgtctttttcggatgcatccttagagacacctaaaatgtcataataatcttgttctgccatataataaatacctcattactttattgcttgtttagttataccacagccagcaaacgaaagtaaaagccaaagtccttttttctggcctttggcttttacactaacattttaagactgtttaccgcaggctatttcttgtcgtctggtgtaacgtccttaaaatcaccatcaacagtattgtcatcattaccgttgttattaccattttgttggttatcaccaggctgaccattagcagcgccaccttgtgcaccttgagcttgttggtaaagctttacgctaaggtcttgaataactttgtttaaagcatccttcttagctttcatttcatcaaggttgccgctttctttagccttctttaattcgtcacgagcactttcagccttcttgatatcatcttcaggaactttacccttaacttccttcaaagtcttatcaacttggaagagttcttggtcaacttcattctttaagtcaacttcttccttcttcttcttgtcggcttcagcatgctcttcagcatccttcttcatccgttcaatttcttcatcacttaagcctgagttagacttgatagtgatattttgcttcttgtgagttccttgatcttcagcagaaacattaacaataccgttcttatcgatatcaaatgtaactttgatttgaggaacaccacgaggagcagcaggaatatcagttagttggaagttacctaaagtcttgttatctgctgccattggacgttcaccttgaagaacgtgaatatcaacagctggttggttatcagcagcagtagagaagatttgactctttgaagtaggaatagttgtgttacggtcaatcaacttagtgaagacaccacccatggtttcaataccaagtgaaagtggagtaacatcaagtaatacgacatccttaacatcaccagtaagaaccccaccttgaatagctgcaccaagagcaacggcttcgtcaggattaattgagtggttaggttccttaccagttaattccttaaccatttcttgaacagcaggaatacgagtagatccaccgtttaagataacttcatcaatgtcatcaaaagtaagatcagcatctttcaaagcattcaatactggttgctttgtccgttcaactaagtcattagttaattggttaaattgtgcccggcttaatgtcttttccaagtgtaatggaccgttttcaccagctgaaataaatggtaagctgatttgtgcctcttgaacacctgacaagtccttcttagccttttcagcagcatccttcaaacgttgaagagccatcttatcttgagaaagatcaacaccatgttcttccttaaagccatcaattaaccaatccatgatcttttggtcaaagtcatccccacctaaatgagtatcaccattagtagaaagaacttggaagacaccgtcacctaattcaaggatggaaacatcgaatgtaccaccaccaaggtcataaacaaggatcttttcatctttgtccttcttgtcaagaccgtatgctagggatgaagcagtaggttcgttaataatccgctttacatcaaggcccgcaattttaccggcatccttagtagcttgacgttgagcatcattgaagtatgcaggaacagtaataactgcttgagtaacagtatcaccaatgtagtcttcagcatatttcttaaggtattgcaaaatcattgctgaaatttcttgtggagtatatttcttaccatcaacttcaacagtgtatcctgcttcacccatgtgactcttgattgatgaaatagtgttaggattagtaatcgcttgacgctttgctacttctccaacttgagtttcaccattcttaaatgaaacaacagatggtgttgtccgacttccttctgggttggtgataatcttaggttcattaccttccataacagcaaccgcagagttagtagtacctaaatcaataccaataatcttattacttgccataatttatttccttctctcacaaatttattgagctacaacaaccattgctgggcgtaatacccggtctttgagttgatatcctgcttgaagaacattaacaacagtttcaggcttctgaccttcttcgaccgaaacagtttgaactgcctggtgaagagtaggatcaaatgtttcaccatcagctttgatttcagtgatgccatgatcatttaatgcctttacaagatgatcatggaccatttgaatgccctttttaagttgcttgccattatcgtctacaacttcaattgctaaagcccgtttaaggttatcaagcactggtaaaattgactttgctaaatcctgaccatcatatttaaggatttgagcccgttctttattaaaacgattagtcatattttgaatttctgcttctgctcgtaaatatttgtcatctttatcagcgagctgcttctttaagtcagcgatctcttcttttaatttaacagtttgatcatccttcttatctgaagcctctttttttatatcttttttaggtgccttttcattttcaggcgcagtttgtttttgttgttcttcttgtttttccttggccaattaactcgcctcctatgaatcataatagtgacggtagaaatctaatagccgttttgctaattcttggcgaaaggcatttacaattccaatcgtccgtgaataaggcatccttgttggaccaagaactgcaataattcctcgtccatattgttcaacattataacttgcagtaatcaagctataatcatcaagaagcttattcttagagatttcttgaccgattttaacattaactccattatctgaggtaagtgttgaatccaagatattcgataagttgtcgttcttatctaacaagccatacagtgattggattgcatggggatcatgagtacttgcaaaatccagtaagttcaatcgaccaccaacgaaaaaccgctcacgtgctgcttgagataagacattatcaaaaatatcaaggaaaccatcgggactatgcatataatgcagaacctgaagtggaatatcatcttttagtcgttttaccacttctgatagcggcaaaccaactaattgatcattaatcattctaattactgtctgcaatgcatctgtgtcaatgtctgccggcaaagtgaatgactgattttcaacctcaccgctatcggtaaccaagatcgcaataaccttatgatttcctagcggcacaactcgaaagccactcaaacgaacactttcttgctcaggctttaatgtaaaagcagtatatgaagttaagtttgataagatatctgctgaatgtgaaataatctcgtcaatcttttgaaaaccggttccaagtgagttttgaattactaccaggtcattatcagtaactgcttgtggatcaagcaaattatcaacataataacggtaacctcgtttagatggaatccggcctgatgaagagtgctcttttaagatcaaatcattgtcctctaaaaccgccatctcattacggacagttgctgaactgaccttaaaaggcaacttttctgctaaatgttttgatccaaccggttgaccagttgatgtgtattgacgtacaatcgcttgcagaatctttttctgtcgttgtgttagcatcgtatatcacttccccttttagcactcattagggtcaagtgctaaacacactgtataatataccaattactcccctaaaagtcaagaaacgtcaaataatttttaaaaggagctttatccatgaaacataaagaacatcgctatattcaacctcagaatactcaagaagcaatgttattaattcagaagttatttaataaataccgcaatgcgtccctaacgaatgaactattagaataccataacaacctaatctatcgtttgcagtcagatattaaagacgaagcaattaaggagaacaatcctaatcaacttaaggcacttgcttccatgaccgaaattatgcgtaactggacaacagtacgcttaaacggccagccttttaacgggaaaatgcggcatttcaaattagtgactgatggcggattcaaatttgaacgaaatattcataaaattaaccagactaccagtcatcggggaagtcggcattaaaaaagaggtttgatgaatcttggtggcgaaattgccacgaaagatcaatctaaacctcttttatttatatttttctaaaatacgacgggcgttttgttcatcttgcttcatctgtgctactaatgcatccgctcccgtgaacttttcttcgccacgaaggtactgataccagcgcacaactacttcttcaccatacaccatttgttgaaaatcaaatagattaatctcaaccgttaattgattagcatcgccaaatgttatgttatggccaacacttgccatgccgtcataccacttcttaccgagcttaactttgacagcatagaccccaatcccaggaattcgctcctcttctggatgctcaacattgattgtaggaaaaccaagtgttcgtccacgagctaagccatgaactactaagccagttgtttgataaggataccctagtgcttggttggctgcttctacattaccagcatcaattaatttccgaatttctcgcgaaccgaccttttcttgacttccatcctcagtaaatttgggcacagttacaacttcaaaccgtcccgctgcatacttaggaagcaacttcattgatgcaatatcttcttttccataagtatgatcaaaacctgctacgaccgtttgagcatgaaagcctaccaaatactcatcaacaaattgctgaggagaaagacttgcaaaagacgaggtaaagcttattaaataaacccgatcgacatcaaggtcatttaataactcaagcttcctatcgaccgttgatagatatttaaagccgcccttatattgacgataaacaattcctggagcatgatcatacgtcaaaactactaatggcaatcctttttcacgggcaatttcacgggcacgtttgattactgcctgatgtccccgatgaacaccatcaaagaaacccattgcaagtacaattggccccgcaggaattagtcttttttccaaaggatggtgaattttaataacttgcaactcctacactcctcaattaactgcaaacattttagttggcttatacattttatttttcggatcaaaatgatatagtgcttttacttgtccatcaaatgataacacaatttccttctcactagtattaagttcacttggagaaagccatcctccattttgaacctttttccattgagcctcttgaatcgttaattgcggatagtccttcaaagcataatctaaaggatacaaatattgctggagagtttgggtcgcaacagcatcgcgaacgtcgtctaaacttagagtctgatcaagagtaaagcctccactcttcaaccgcgttaacaaactcattactcctggataccctagtttacgtgcaaggtcaacaacaagcgtccgaatataagtacccttactacattcaacattaaaacggattcgttgttgtttattttcctcatcatactttgagcttagtaattcaaatttgctaatagtcacttgtcgtttgggccgttcaacagtttcaccagttcttgcatattcataaagtttttttccatttacttttacagccgaatacatcggtgggatttgtattattgtccccgttaatgaattcatggctgataggatttcactagtcggaatttcatttgtaacttctttgtcctcaattttttctccatcaaggtcttgagtagtagtcgcaaaaccaattaaaagctcgccttgatattgttttcctgattgcatcaaataatcaacaactttggtagcatttccaacacaaattggtaaaacacccgctacacctggatcaagtgttcctgaatgaccaatctttttagtttttaaaatttgtcgtagtcgactaacacatgcaaaactagtcatcccacgttctttatataagggtattattccatccatcattattcctccaaggggctgctgtgatataagtcaagttactttcacaaaagacaaatagtgcagtacaacaatggcccccatcgctcggtaaaaaaacgaacgttggaggcctgttgcttgcgaggggctcccagaggcttgcttcgcgtcgaaaaacgaagtcacaagtaacttctgtctcgctcccttttcctgctaattatttttcttttttgtgtaagtcgttaatgagttgatcaattcgactaccgtaagcaactgatgggtctcttacaaatttgatttctggagtcttaaaaatattaagacgtgcgcctaattcactgcgaattaacccagttgccttatctaatccagcctgtgccttctccgcatcagaagcaagatctgacaagatactgtaatagatggttgcttgctggagatcaccagtaacatccacacctgtaattgtaacgttttgtacacgtggatcacgaacacgttttaacaagatttcatcaacatctttttgaatttcttgagctaaacggtctactcgatattgtttacttggcatctttatctctcctcagcttttacttaactggaacttctttcatcttgtaggcttcaataacatccatttctttaatgtcattgtagttttcaattgtcaacccacattcgtaaccttgcttaacttctttgacatcatctttgaagcgcttaagactacctaattcaccttcgtaaataacaacgccatcacgaactaaacgaacctttgcatcacgggtaatcttaccagaagtaaccattccccggcaattgtaccaacttttgatgccttatagatttgacgaacttctacctgaccaattgtttcttccttgtataccggttcaagcattcccttcatcgcatcttcaacttcttcaattgcatcgtaaatgacacggtgaagacggatatcaatactattagagtcagccaatgtcttagctacggcagttgggcgaacattaaaaccaatgataaccgcattagacgcttcagctaaggtaacatcactttgattaatggcaccaacggcttggtgaataatatcaacacgaacaccgtcaactttaatcttttgaaggctttgacttagagcctcaacagatccctgaacatcggctttaatgataatcggtaaggtcttcatttgacccttcttcatagttgcaaagaggttatctaatgtaacatgagaagtcttttgacgttccttatccattgctcgttttgcccgttcttcacctgctgcacgggcagtcttttcatcatcaaagacaacaaaccgatccccggcttctggtacttcatttaacccagtaatctcaacaggagtagatggggtagcttctttaatacgacgaccattttcatttgtcattgtccgcacacgaccaaatgtgttaccaacaacaattgggtccccaacatgaagagtaccttgttgaattaaaacagtggcaactgatccccgaccttgatcaaggcgggcttcaacaactgatccagccgcattttgatccggattagcctttaattccagcatttcagcttggagtagaatcatatcaagtaattcatcaagattcttaccaaatttggcagaaatcttaacaaaaatcgtatctccaccccagtcttcaggaatcaagttatactttgctaattcttcagttacacgatctggatttgcacctggcttatcaatcttgttaactgcaacaataattggtgtttgggcagcttgcgcgtggtgaatagcttcaactgtctgtggcataactccatcatcagctgcaacaacaaggaccgtgatatcagtaatattagctcctcgtgcacgcatttcagtaaaggccgcgtgtcctggcgtatcaaggaacgtaattaattgatcattatagtgaacttggtaagcaccaatttcctgggtgattccccctgcttcatgttcagtaacatgagagtgacgtaacttatcaagcaaggttgtcttaccatggtcaacgtgtcccataacagtaacaacagctggccgcgttacttgatgttcagtattattttgttcatcttcaaacatcttatcaatgtctgaaacgtcaacttgaaccttttccttagcctcaataccgtaatcagttgctaataattcaattgtatccttatcaagtgactgattttggttgatcattacaccaagcataaataactttttaacgatttctgctggtgaacggtgtaagatctttcctaagtcttgggcattcatcccatcagtatattctaatacttctggaagcggcttatcttttcgttgtgttggttgcttatgagctacttcacgtaaccgcttgttcttattgtgtttcttattcttcttatttttcttattaaagcgtttgccattacggccttgatcgttatttaagctgccgccaaatcgaccaccattgttttggtgttgattattatcttttgttccattgtttggtcggctattgtttttcttttgtggacgctcattttgtgccttatcatgatcgtggtgttgattgtgattttgtgcttgatggttattttgcttattgtgaccatcatttttctttactggttggcgttgattattagttgttttttgtccaccctttgcaagttgacgtaattgttgcgcttgatctggggtaacagaagacatgtgacttttaactcccattccttgccgattggccatattaactaagtctttgctaggcatttttaattccttagctaattcataaattcgttctttggccatatgctcacactccttatctcatagttagtagttcctcaaactttcttgcaaaacctgattgcattacacaaaaaactgttcgtgcttgccctgttgcccggctaagttgttctctagtgaaatctgttgaaaaaggaatgccataaaatttacatttatcagtaatcttttttgcactagcttttccagcatctgaagctaggaatacaaactttgcctttttagtttgaatattttttaagacaatctcttccccactctgaagttgccgggcacgccgagcgattccaaggaggtttaagacctgttctttatttttgatcattaccaaataactcttgtcgtgcctgtaggtggtctgcatacttgattaattcatcataaaatgattcatcaagttgaacatgaaaagctttttcaaaagttttttctttcttggcgcgctttgcaatatccacatctactgcaacatatgctccacgaccaggctttttaccagttgggtctaaggagacttcattttccttattcttaactacccgaatcaattgccttttaggcatcatttcaccggtaacaatgtctttacgcatcggtatttttctctttttcattattttcaccccgctgcttaatttctagttattcttcgttattgtcaacattttcttctaaatcagctacttcttcagattcttggtcattttcagccatttcagattcagacttgatatcaatcttgtacttagtcaaccgagcagcaagacgagcattttgtcctcgcttaccgatggctaaggataattggctatctgggacaacgacagtgcatgaacgttctgtttgtccttcagtcgtttcttcaccttcgctatcctcagtttcgcttgctgccttctcttcgttaaagattacatccagtacttctgctgggttcaatgcattagcgataaacttagcgggctccttaacatactccacaatatccatattctcgccatcaagttcattaacgattgcttgtacacgagaacctcgtggaccaacgcaagttccaactggatcaacattaggatcatttgagtatactgcaaccttagcacgatcacctgcttcacgagcaatattttcgattaagacagtcccatccttgatttcaggcacttctcgttcaaataatcgctttaaaagttctggagcagtccggctaacaaaaatttgtggtccccgacgatcgtcatttactttcgttacgtatacttgaatccgatcatggacgtggtagtgctcattaggcatcttatctctaaagcccatggcaccttctacaccatctcctaaatcaacatatgtgaaacgcttatcttctcgtgaaacttcaccagtgataatctcattttcataagtcttatacttgtcgtaaatgattttccgttcttcttcacggagacgctgcattactacttgtttagcagtttgggcagcaatccgaccaaaatcacgaggggtaacttcttcgcgaatttcatcaccaatatcataaccttggccatgaggaagcttccgtgcatcagctaaactcataaattcgttgctgtctgcttcgactgcttcttcatcatcagtaattgtttttacagcgtagactttaatattaccagtcaatgaattgaattctacttcaacattcttatcaccgtaattttgcttgtatgctgattcaagtgcttgttctaacgcttcaataacaatctctttcttgatccccttttctttttcaagataatcaagggcgccaatcatctcagtgttaatttttggcttactcacctttcgacactcctttaatactagaatttaatcgctaatcgggcctgggcaattttctgacgatcaatcgtaatttgccgatgacgagtcttgtctaaataatccaacgtaatttctttattagacaattgcgttaacgtaccctcataaaccttttgaccattaatctgttggtaaagagaaatgtgaatgtaatggtcaattgctcgttgataatcttcctctttcttcagtgggcgttcagcacctggtgaggaaacttctaaaaagtaagcctgtggaattggatcaggttcaacattatctaatgcttcacttaattcatcactgacaagtgcgcaatcttctagcgtaatcccaccgtctttatcaatataaacgcggaggtaccagcttttaccttcttttacaaactctaaatcatataagtaaaaatcatggtcctgtaaaatcggcgttacaagatctgttacagtttctacaacactgctcaaacgtgtcacctccattatttgcaataaaaagagcgagcatctctgctcactcccacgagttatttaccataatctattgtagcatgtaacacagccactggcaagcaatgaagcatgttttcattactattccttaaaacaagctaagttgattttcgtcaggcagcttatctaatacatgattatctgtcaaaaagtcaataagtgtctgcgaaacctttccacgctctgccaaatcttctttagaaaggaatggacgttcttcacgtgcggcaacaatttgcttagcaacgtttagccctaatccaggaactgctcggaatggtgcaattaatgaatcaccatcaatcaaccaatcggaggcatctgatttttcaatatcaaccatcttaaacttaaagccccgttccagcatctcattagctagttcaagaattgttaagagattcttctcttttgcactggcatcatttcccttatcattgatttctttcatccgttgcttaaccgcatctttaccatgagacatcgctactacatcaaagtcatctgctcgcacagagaagaatgcacaataataaactaacgggaaataaaccttaaagtaagcaattcgtagagccatcaagacataagcagccgcgtgcgcccgcgggaacatatacttaatcttcaaacatgagtccatataccattgtggaacattagcttcatgcatcttttcttgccactcgtctggaatcccgcgccccttccgtacgtgttccataatttggaaagaaatttctgagtccattccatagtggattaagtcggtcatgatgttatcacgacaaccaataacattagcgatagtggcaattccctgtttgattagttcctgggcattatctagccacacaccagtcccatgtgaaagaccagaaatttgtaataattgcgagtaatttttcggatgagtatcctccagcatcccccggacaaatcgcgtcccgaattccggcaatcctagtgtaccagttttactttgaatttgttcttcagttacccctaataccttaggactagagaataaggccatcacccctggatcatccattggaatcgattgaggatcaattcctgataaatcttgcaaggcacgaatcatcgttggatcatcatgtcccaaaatatccattttaagaatattatcgtgaatcgagtggaaatcaaagtgagttgtttcccaggcagctgtttgatcatcagcaggatactgtacaggtgtaaagtcataaatatccatatcatcaggaacaataataattcccgctgggtgctgaccagtagttcgcttaacaccagtagctccttttgctaagcgatcctcctctgcctttctaaattccttttctgtatctcgttcgtaagccttcacatatccatatgccgtcttatcagcaaccgtaccaattgtcccggcacggaatacatttttttcaccgaataagactttcatatagttatgggcaattggctggtagtcaccagagaagtttaaatcaatatctggtaccttattacccttaaacccaaggaaagtttggaatggaatatcatgaccgtcttttaccattagagtgccacactttggacattttttatctggcaaatcgaaacctgaactatattccccttgcgtatagaagtgggtaaattgacaatttggacaacggtaatgcggtggcaacgggttaacttctgtaattcccgaaagcgttgcaaccacacttgaaccaacagatccccgcgaacctactaagtatccgtctttattagacttagctactagtcgttgggcaattaaatagtgaacagagaatccgttcttaacaatactgttcaactctaattcaatccggtcctgaactagttgtggcaaaggatcaccataccattttcgcgcagtattccatgtccgatcttggatttcctgttcggcccccttcatatgcggtggataaagtttatcttttactggccgaatattgtcatcaatctcagctgcaatcttattactattctctacaactaattcgtgggctttttcttcaccgagaaaagcaaattcatttaacatttcatcagtggtcctaaagtgcacttctggacgctcagttcgatttaacgggtttgcgccaccttgcgaattaatcaggatcttacggtaaattgcatcatgtggatcaaggtaatggacatctccagtggcaaccactgttttttccaactcatcccctagtttgaccatatttttgaggatatcttcgaggtggtcttcatctgcaatcacatgttgttcaagtaacggtgcatagtttggcttgggctgaacttcaataaaatcatagtagcgcgccttttctagtgcttgatcgtaacctttctccatcatcgcggtaaatacttctcccgatgaacaagcagttcccaaaagcagtccttcacgatatttcgtcagcactgttcgcgggattcgcggtactcggtaaaaatattcaacgtttgatagcgatactaacttaaataagtttttcaaaccagcctgggtctgcgcaaaaatcgttacatgaaaaggccgcgcatgacggtaagcattattttcttccatgtgcttatttaaatcatccacatacttcacatcataacgggcttcagcatctttcaagaacttataaagcaagtgtcctgtagcttccgaatcatagttagcacggtggtgatgttccaatgctaccttaaactttttactaagcgtgtttaatcggtatcctcgcatatcaggatataagaatcgcgccagtggtaatgtatcgattactggttccgcgatttttcccatttgatgacgttcatagccagtattcataaaacccatatcaaatgcaacgttatgaccagcaatgatacagcccttacaaaagtccttaaacatctgaaaaacttcttcttcagtttttgaaccctgaaccatttcagtggtgatactagttaaattagttgtttgttctgataacgggaaaccaggatcgatgaattcatcaaaacgttctaagacatttccatcttgcattttaactgcagacaattcaattaccttatcgtaaattgccgataaccctgtcgtttccacgtcaaaaatgacataggtctgatgagcgagttcttcatgattctcgttgtataccaatggaattccatcatcaacaacattagcttccattccatatagcattttaatgcccgttttttgggccacgctaaatgcttctggaaaagcctggacattcccatgatcggttaccgcaattgctggatgtccccacttatgagcacgagttgcaagctcagtaatcgaattagtggcatccatctgactcattgttgtatgcgtatgaagttcaactcgtttatcatcttgaggagctttatcttgacgcgccgtatgagttacttcattaacatcataagccgtgattaccaagtctcgcatccaagtatcttcttgtacaggcccgcgaactttcaaccacattcctgctttgatattggcaaattgtgcttcttcatcactgttgcgtgagaatttcttgacagcaaaagaagaagtgtagtcagtaatttcaaaggttaataattgacgacctgagcgtagttcgcgaatttctgcattaaatacatatccttcaacaaccacggaccgctcttcaccctcaatgtctttcatttgaataacattctgcttactatcaatcatccggccaagttgaactgggccatcagcaggagcaactggtgcactcttctttgctgtcttctttgcagcctcatttttcttgatccgggcagccgccttggcagcaagcgcagcatcggctttctcgtgtttagcctttaattcttcaatttttgcttgcgaggctgactggtcaacaaatgggtgaatcctaaatttaggaaagcccagctcttggtatgatttttcaatcttatctaatgctttctgtgctagtaagtctttaattacctcattttcaacaactagcgttacacgaccctccttaacctcgggagccgtttgtaagcaagcttgttggagcattggtgtatcactaattgccttattaatgatgaactgccaataattagctatctgtgattcatcaagttttgtcatgggagtactaatcttcaaactaactttagcaatatctttgaaccctagctgtaagctctggttgaactgcgtaaataggtcatacggtaaagctttattaaagattaagtgaaattcccagtgccgagactttttatgaacaacaactgattgaactgcggcatttctgaatgcagaattgtctttttccggaaagtgaatttgttctaatagttttccaaataattcttggcgacttaatcccacgttctaatcctcctacttaaaaatgtggtgcgagtaacgttatttatcttaacatcgcagccacattagtttaaattatttgtttttttcttcgttcaattgctttagtaaaattcccaccgtatttactagctcttcctgtttaacttcaacagtttcaccagttttacggatcttaatttcaacaataccatcttgagctttcttaccaacagtaacccgaattggaataccaatcaagtctgaatcagcaaatttaacccctgctcgttcttttcggtcatctactaatacctcataaccagcttcagttaattgttgatcgatcttatcagccattgccatttgatcttctttcttcgcattaactggaattacatgaacatcaaatggagcaatactattaggccagacaagaccattttcatcagcattttgttctgcaacagctgacaatagacgggttacaccaataccgtaacttcccatgattacgtctgtcaaacgaccattgctatcaagaacttgggcaccaagtttgcttgagtaatgagtacctaacttaaagatatgaccaatttcaattccgggagtaaatttaagtggtttaccatcaggagcaatctcgccttctttaacattccggaagtcaccaaattgatcaacgcggaagtcacggtcaatattagcattaatataatggtaaccatcttcattagcaccacatgccatgttaactaaaaccttaacataattatcagcaagaatttttacttcttcgcctactcctacaggtcctaatgatccaggatgagcattaaggtacttttcggcatcttcttctgtagctaattcaagttcttcacaatcaagagcattcgttacctttgcttcattaacttcatcgtcgccacgcattaatactaagaccggttggtattcatcttcactcattttagcaatgtaaagcattgatttgataacttgattaggatcaagatctaaactttctgcagcttcatctaccgtatgagcacccggagtagcttttttctcaattggtgcaggagcagctgttcgttgtacaccagtaaatttactttcagctttctcaatattggcagcgtaatctccatcagtataagcgattatgtcttcccctacttcagctggtgcagagaattcttgtgagttcttaccacccattgttcccgaatcagcgagaataactttatagtttaagccaatccgatcaaaaatgttccggtaagcctttgcttgattattgtaggcttcgtctaatccttcttgatctgctgagaaggaataaccatcaagcatttcaaattcttttccacgaagaattccataacgaggacgatcttcatcacgaaacttatcttgtaattgataaactactaatggcagcttcttgtacgacttaatactatcacgcaatacttcagtaaaggtttcttcatgagttgggcccaaaataaagtcacggtcacgacgatctttaagtttaaaaagattatcaccatagctttcgtaacgaccagattccttccacaaatcagctggaagaagtcccggcataagcatttcaaccgctccggccttatccatttcatcacgaataatattttctacttttcgaataacccggtaagctaatggtaaatatgaccatacccctgcagatacttggtaaatgtagccggcacgaatcatcatcttatgacttaaggcttctgcatcacttggggcctctttttttgttggaattaatacctttgactgtttcattaaaactatactcctttgtttttaattaccgaataaaatatctttgaatatcgttccatgttactagaaccataagtgttagtaagattagaaaaccaatcattgtgataattccctcagctttttcaggaattggtcgccgaatgatcgcttcaacaatattcaataataatttcccaccatctaatgctggaattggtaataagttaacaattcctaaattaattgataagagggctaagaaatttaaaactccattgattcccaatgaggtggcttgtgatgtcccagcataaattgctaccggtccaccaaggtcatttaagctaaatccatgggtaaccatatgaccaagaacactaaagattaatgttcccgcttggataaattgttgccaaccaaactttaatcgagcagctaaacttctctcttgcttttcaacaattccaatttggccaactttctgatgccctcgctcaactgcttttggtgttagcttagtatgatatgtcttattaccacgctcatacgttactgatactgtcttgttaggcttatttgaaatattagttgaaaggtcagtccaattatttattttttggttgttaaccttaacaatccgatcatttgcttttaagcccgctttggcagctacggaaccggcattcacttgccctaactgattgctattagttggtacgcccgttaaggtaaaaccaagaatgataaatactactaaggacaaaataaaattattcattggaccagcaaaattagtcatcatccgtgcaggcagacttgctgaacgaaattgcacatcacgtggagcaatctgtacctcggttccgtctcgttcaataatcattgcatcatggtcaacactatataccttcagctgatcttcgtccccattgacatatccttttatccataagccatcttctaaatcacaagcaactaattgaaggggatcccctgaaataaggttgttttatcactagcattaatactaataactttatcttgatcatttagttgaatcgttagaggggtacctggctttaactcatcttggtcctcatcatcagcaccagctaaacgaacataaccaccgaggggcaaaattcgaatagtataggtagtaccattttttcgtttccaccaaatttttggacccattcctattgaaaattcacgaaccagaattcctgctcgtttagcaaaataataatgaccatattcatgaacaaggacaaggattccaaaaacaataataaatgtaataattgttattatcaaaaaatctcttccttacgtttgattaaatgatccctaataaatgaagcattggcataacaattagcatactatcaaaccgatctaaaattccgccatggcctggaagaatttttcccgaatcctttacaccatagtagcgttttaatgatgattcgattaagtcaccaaattgaccgaagattgaaagaatcaaagtaacgaatatcattgttacccaacctgcaccaacagggataaagtagcaataaatagccaaaataataacagcagctaatgtaccaccaattgaaccttcccaagttttattaggactaatcttaggagcgagtttatttttaccaatttttcggccaattaaatatgctccactatctgtaatccaaacgattaacattccatataatagcgtttgaaaattgattgcacgagcagcaataaaatagcgaaatcccattccaatatagagcattgctaatgttaaaaccccagcatcatcgaaagtaaagcgttgttttcgaataaccgtatgtaatagaagtaaaacaactaaaatatagaatccgaaccatcgagttgcaacactaggcaagaagtcaagccaactatccggcagtattaataatgcaacccccagataactgatcaaagcttcaaacgaaattacaaacatttttttcattaccaatacttctgacattgcaaccattcctaaggcaacggctgcaattgttaatggccaatgaccatatataataagcggtataaagattgcaagtgcaattaccgcggtcgttattcttgttttcaaaacaaaatccccttattatttattgattttttagtccaccgaaccgccgatgacgtccttgataggcaattattgctgaccgtaatgaatcttcatcaaagtctggccagtgttctggaacaaactccaattcactataagcaatttgccacagcataaagttactaatccgctcttcgccacttgttctgattagcaggtcaggatctgcaaattgacccagttgtgctgacatcaagtacttaccaaacgaagcttcatcaatatccgcaagtgccaagttcccattttgaacgtcttctgcaatctctttagcagcttgagtgatctcatctcgactcccataattcaaagcaaaattgagaatcatccccgtacaatgggctgtatcagccattgcatctttaacagctttttgcgtagcttcaggcagttgcgtaatatctcccatcactgtcaccttaacattatgtttgacaagatctggaacaaatgttgagaagaagcggacaggcaactgcattaaataacttacctctgaagaaggacgtttccagttttcggttgaaaaagcatataatgataagacttttacccctaattcactggcagcaattgtaatcttttttactgtttgcattccttgcttatgaccagcaacccgtggaaggtgtcgtttctgcgcccacctaccattaccgtccataataattgcaatatggttaggaatacgttccatatcaagttgctgatttatttcatcatgtttacttttggaaaacactaattgttcctccattttttatcatgtacttaagattaattacagacacttcttaaaaattcacgtctgccaattaattatagcctttattataccagaggcaaatttcgatttgtcaatccacagtaaattgttacatagttttatcataacaattcaattttagccaaaataaaaaggttgtggacttacgcaaagttcacaacctttttatttctgaaaactagccttccattaattccttttcttttgtattcgcaatatcttcaaggttcttaattccagcatctgtttcgttttgaactttcttttcaagatcatggaattcatcatcattaaagtcgccattcttgttacccttctttaagtcatccatcgcttcacgacgaacatttcgaactgcaacttttgccttttctaattcagctttaacgtcctttactaattctttccgccgatcttcagttaattgtgggatgattaagcgaattgaacttccgtcgttttgaggagttaatcctaaattagatgcatagattgctttttcaatttcttcaagcacgctttcgtcataaggggtgattaataattgccgtgcttctggaattgtgattgatgcaacttgatttaatggagttggtgctccgtaatattcaactttaacagaatttaataaacttgcattggcttgacccgcacgaatatcagcaagtgtccgctgaagtgcatcacctgattttgccattttttgtttggcatcatttaaaatttcttttcctgtagccatattattagtctccttcaattgttgtaccaacttcttgaccagttactactttcataatattgcctgatgtgttcaagttgaagactaccaatggaatatgattgtccatcgatagtgaactagcagtagtatccattacatgtaaattcttttcaatgatatccatatgggttaaatgatcaaacttagtagcatccttaactttatttggatcagctgagtaaacgccgtcaaccccatttttacccattaaaatggcatcagcgttaatttctgctgctcgtaatgcagcagtagtatcagttgagaagtaaggacttcctgttccaccagcaaaaataacgattcgatctttctctaaatgacgaatagctttccgccgaatatatggttcagcaatttggcgcatttcaattgaagtttgtacccgggtaggaacaccaattgattcaagcgcatcttgaagtgataaggcattcataatagttgctaacattccaatgtaatcagcttgcgcacgttccatccctaattcagcaccagtaacaccacgccacatgttaccaccaccaacaacgatggcaatttgaacgcccaaattatgaacttcttttaattctttagctacatcctttaaaacgggtgggttaatcccaaaacccttgtcgccagctaatgcttctccactgagctttaaaattactcgcttatatttaatatctgccatatgatatcctccttgaattggtaagttaatctttaaaaaaggacgcactacattgagtacgtcctccttttgaccgaacgcttagttcatttggtccttaacttcttgagcaaagtcatcttgctttttttcgattccttcaccgacttcgtaacgaatgaaggacttcaacttaccattcttgcttgaaacgtattgttcaacagtttggtcagaatccttaacaaagtcttgatctgctaaacaaatttgtgaaaggaacttgtttaaacgaccttcaacaatcttgtcaacgatcttttcaggctttccttcgtttaaagtttcttccttgaagatagcacgttcatggtcaagacgttcttgagaaacatcatcacgagtcatgaattcagggttgatagctgcaacgtgcattgcaacgtctttagcagtggcatcgtcagcaccttctaagacaaccaatgcagcaatttgaccaccttggtgtaagtatgcaccaaagctatcgccgtcatccttttctacaacagtaaaccgacgaaggctaaccttttcaccagttttttgtgtagtactgataatatcatcatttaatgtgccattttcagtcttgatttctaatgcttcttcaacattagcaggcttgttttcactaattaacttagtaaccttcttcaataagtccttaaatggttcactagcagcaacgaaatcagtttctgaattcaattcaacgattgcagctgtattgccattaacagcaatatcagctaagccttcagctgcaacacgatcactcttcttggctgccttagcaatacccttttcacgaaggtagtccattgctttgtccatgtcaccattactagcaactaatgccttcttagcatccatgataccggcaccggattttttacgtaattgcataacttgagcagctttaatttcagccatgacgaaatctctccttttataatcttttttgaaaaaagggctgtttagtacttaggccagaatggtccgtacaaaacagcccaagaatttaatatttttagtcttctttaccttcaacgctgttcttcaagttctttaatgaatcttcgctaacagtttcgttagcagcgttatcatcagcagtttcttgttgagcatcgtcttgaccttgcttaccttcaacaaaagcatcagccatctttgaagtgattaagcgaacggcacggatagcatcatcgtttgatgggataacgtaatcaatgtcgtctgggtcagtgttagtatcaaccatagctacgattggaatgtgtaacttttgagcttccttaacagcgatttgttccttgtgaggatcaacaatgaacataacatctgggatccgtggcatatcttcaataccaccaaggaaacgttcaagcttttcacgttgcttagttaagacagcaacttccttcttaggaagaacatcaaatgtaccgtcttcgctcatcttcttaagttccttcaaacgagcaatccgtgattggatagtcttccagttggtcaaagtaccacctaaccaacggtggttaacgtagtattgacctgcacgaatagcttcttcttcaatagcatcttgagcttgcttctttgtaccaacaaataaagcaacaccatcgttagcagcaacatctttcatgtagttgtaagcagtatcaattaacttaacagtcttttgtaagtcaatgatgtaaataccgttacgttcagtaaagatgtattcttccatctttgggttccaacgacgagtttggtgaccgaagtggacaccggcttcaagcaattgcttcatagatacaacagacataaataatacctccaaattgtttctcctccccagtcttcttctggcaatgggactatttaagcaccctcaccaccatcattctgggtgtgaaattggcgtgtaacaccgaaatatagtatacaaaaaaccttgcaaactgacaaggtttttcacttaacttattttaaaatttaactagtttatctgaggtgccagttttaatcaaatctagattggcggacaaactcatcttaaccatatttttaattgcttgatcagtatagaaagcaatatgtggcgtgattaaaacatttggccgatcaactaaatccttaaattcgttataatcaacttcttggaaatcaatttgctggttaaaaatcttggtttcaccagtcattacgtctaaagcagctcctccgactttaccgctattcaacgcttcaatcaatgccttttcatcgactaatggtccacgtgcagtgttaaccagtaagaccccgtcctgcatcattgcaaatgttttttcattaagcattttatctgtcgctggaacatgaggtaaataaagcgaaataattgttgcccgtttatataattcatcaaggctaacgtattcaacaattccttctagttccttattttggtgacggctatatgcaatcacttttgcaccaaaaccagcaaagattttagctgctgtggatccaatgtttcctgttccaactatccgacaacctgcttattcatttccttagcaatatgcggtgcccagttataatctccttttgctaattttaaataaaattcttttgttcgacgtaaaaggttgagtgcttgagtaactgaaaattcagcaattgcagctggggaataaactggtacgttagtaatttggaaaccaagttctcgtactaattcatgattaagattatcaaccccaacattccgcaatgacatctttgtaataccattaaacgctaattgacgtaaggcctcgtctgaataaggcttttgctggaatactactactccatcgcttcctttagacaagttgactgtgctttcgtctaaaagtttagttgttgagtctacagttacttcaggatgttcctcttgccattcctcaatgtaagggacttcatcctgataaacaccatacatataaatcttcatcttaattcctccgtagtttcaataaattaacaccatggtctagtaaaaatttttctttttggcggcgggtttgatgtttaaaataatattccgcacttaaggcatcatgctttgattcaaattcctctgaataaataagctttagtggatgacgctttttcacacgagtatattttgccccttgataagtttgatgagtatgaaagcgccgtttaacattgttggtaaagccacaataaaagctattatctgcacaatacaatacataaatatagtatttctcacttgccatataataactcctgaaccgctggagtatactggttatctgctccatgaacaatcaatggtggtactacttttactcctccaggccggccatccttaatcacttcaagcaacaaaatattcgcatcacgatcaggtttaggatgaataaattgaattcttttaggtgctaatctattttcctgacacacttgtaaaatctcacctaaacgatctggacgatgcacaagatacccatgaccattcatttttaataagccattcatctttttaacaactgtcactaaatcagtcgctatttcgtgacgagcaatcgctaaagctttatttggattcttctggctttgggctgtaactgggaaataaggaggattacaaaggacaatatcaatcgagtccttagaaatataatcattaacgtttgcgatatcatcattaatgacggtataacgatcttgtaaatcatttagcaaaattgtccgttcagccatatcagcaatctgtggttgtaattcaacttcggtaaatgttccgccaagcttatcgtggagaaaaatgccgattgccccatttccagcgcacaagtcaacaatttttaatttctgtcgatgattgggacgcacaaagtttgctaataagacagcatctaacgaaaaagcaaaataatggggattttggattatccgtacatcctgactatataactgatcaattctttcatccttttttaaaatatttctgttttccattatgtcctccattatttttgtacttgcaagatccactttttttcgtcatactgaggaacgaaaacttaattttgttatagattggaagattgacatgttgtacactttcctcgttaaaatcgttaatccatttttaaatttgattaacggacgacctaaaatatacaatcgggaaaacatccctgaaggcaattatattattattgcacctcatcgtacttggatggatcctgtcttactagcgcttgccgtatggcccaaaaaatttagcttcatggctaaaaaagaactttttaagaatccaattgctagcaaattcttaaaagcactaaatgcctatccggttgatcggaaaaatccaggtccgtctgctattaaaaagccggttacaattttaaagaagactgacttatcgaccattattttccctagcggatcacgctactcatctaaattaaaaggcggggccaccgtgatcgctaaaatggcaaacgtccccttagttcctgctgtttaccagggacccctaaaatttggccagctatttacccgtaagccgcgccaaattgcatttgggaagcctatttatattgaccgaaagcaacggctcactcccgaagtacaggctgacttagaaaagcaaatgcaagactcctttgaccaattagatagacaaattgatcccaattataaatatattgttcctccaaagccgaagaatgatgaattttaatttccaatataaaaggatgtgataaaaatcacatccttttatattatttacgatttgactttttagcttgtgctttcatcgcttgcatcatttgatgtaatttacgacttgatggtttttgtcccatttgaagcatcatcgtccgcagcatctcttccgaaatcggtggattattgcggaggtagttttccatgtatttacgtgcaccaaagaagccgataaccaaaccgactaataatgcaagaatcattagcatgatcgtcatacccacaattacttcctcctttgctcgttacctatccatcttacacgaaagagcaatttttgaaaagagcaaatcgctgttaatcgtcacgaagtccttttttacgttgaatttcacgaaccttttcaggagtaacctctttaccttctttatcaaaaatccgcatcatttcaatattactacgcattgcttctctaaagttctttaggtattccttacgtaaacgatctcgttctttagtttcttcctcagttaaaccttcttctttattcttatgagcaagttcattaattcgcttcaataaagcatcttgttctttcgattcagccattataatcatctccttaataaagtcgattttacttattttataaaattaatgcaaatcacgaacgtacgtttgaaatatgcatctatctatgataagcttaacacaattaatgataatgaggtgtcaatatggcaaaggtagcaaaaaataaacaaatggccgtcctaaattatattcataaacaagttgaagatcatggctatccaccgactgttcgtgaaatttgtagtgctgttggcctgtcttcaacttcaacagtccatggacacatctctcgcttaattgaacaaggattcttacaaaaagacccttctaaacctcgagcacttgagatcacacccaagggacttgatattttaggtgtaaaaccgattcaaaaagaaattccaatgcttggtgttgttacggctgggcaaccaattttagcagttgaaaatgctactgagtttttcccgatacctccttctattcaagataataatgatttgtttatgcttaccattcgtggaactagtatgattaaagcagggatttttaatggcgaccaagtaattgtgcgtaaacaatccaccgctaaaaatggtgatatcgttattgcaatgaatgatgataatgaagctacttgtaaacgattctataaagaaaaaacacgttttcgtttacagccagaaaatgatacgatggagccaatcttcttagacaatgtaaaaatccttggtaaagtagtgggactatttcgtgatcatattttctaaataaaaaaggagtccattttggggctcctttttatttaggttatttggcttcataaatccgttgatgatccttttgccctttaagaacgaaaggtaatggatcattagtaacatcaaactcgatatcctggtcattcattcctaattgactactgaatagtttttcgtattctgctaccgaaacctggtgacgatgttctagttcttcttgaatattattcatataatgctcgtagccatcttctaggattcctgtgtagaactctccttctgcaccagaaccatagctaaataacccaattcggcttccagcttttaagtcactattttgtaacaatgacattaatgataaatatagggagccagtgtaaaggttaccaacttgacgtgaaaatagttgacttgcggttaattgtgttcgtaatcgttgagctacctcatcattacgatctttgagcagcccttctaaccctttctttcccattttagtaaatggcatatggaatgtaagggcagcaaaatctgctaattctcgcccagttaattgctggtaacgggtaaaagtttgaaggaaaaattcaatataaacattagtagagtattttccatctactaaagcttctgttgcatataacggccgccaaaagtccattatatccttactataagcaaccgttgtatcttcaagggttaggatgtgagggttccgcgaaatcagcattgcaactgctccagctccttgagtcacctctcctggcgtatttaatccataacgagcaatatcagcagcgatcaccaatacagtttcttgaggattaagcgccactactccctttgcaaattggatagcagctgttgcagaataacaagcctctttcatttctaccgttcgggtgaagtcgctaagccctaataagcgtttaatgtagattgcactcgcttttgaattgtcaattcctgactcagttgccacaattactgtcgaaatatttttttctaattccggagtaagcaattttttcgctgccgtagctcctaaagtcacaatatcttgcgtaggtggcacaactgcctgtagatcctgtccaattccaatggtaaatttattaggatctacgctgcgttcttttgctaattcaacaaggtctaaatagtcatttgttgttgcaaaagccattttgtcaataccaattctcatttcttatcatcctcttgtcaaataattataactgatccatcgtcttatttagtaattcatcgaccttattatttccagcattcgttgcatgacccttagtccaatcaaaatgtaaattagggaactgaggtaaaagggtaactatttcttcccatagcttctgatttgctaccggcttgccactagcagttaaccatccccgtcgctgccaattagttaaccagcctttcataattggatcaagtacgtaatgtgaatccaaaatcgctgtaattggttgatcttggaggccaagttctaatagtttagttagtgcttgaattaaagctgtaatctccattttattattagtagccccaaattcgccagcagttcctgtataagcttgatctttagtttgaataaaataagcccaggccgctttatcatctgccttaacatgctgtcccaatttattgccatgattacgggagcctccatcagtataaacaagaatgttatcagaataatcaaccgttttagtcgatggtacgatatttcccgtagcctgaagccactcattagcacctttaaacgttaaaaagcttttgaacttagcattcggatatccattaacttccttctgacattcagcccaagttttatatattcctggatgacgaccttttttgactgcataatatttttttaccataaaaatcccctaattaaatttcaaattacatcatatattagaatatcatatcagcaagaaatcatttctgcaaaattattaaatagctatttccttgattgagttagtgtaagattttcataggttggatgaataattcatctggtcgtggaaatcttttttgtagaccaatttacttatttacaaaaaaagaaaagaccagtagcctttagtgtgtcgaatactaagcaaaggcaggtctttcctcatggatattttaacagaaatcgagcagaatttggtgaaatcaggcagtttatttgaagctgaacagattattttaaaaggggtattggagttaggacaagtaatcatgcaaaactttttggaaagcttagatcgaagcttaaagtcccaagctccagcgaactatcaagtaattaataaacagccacggacgcttaattttatctttggcccggtgacttttcaacgacggtattatcaggctgggacaaagaaacgtgaattttacttagaccaacaattaaaaattaaaccacgtcgtcgtttatcgccacactacttaatgatgatggctaagattgcccaaacaactacaatgcgcaatactgccgacattttgaaccttgtatttgacagcggaattactgccgattcggtaatgcacgccgtgcatgagttaggaaatcaggtagctaaacaaactcaagcaaaagaacaccaagctactcctcgccatatgcctaaaaatttaactattgagggtgatgcctttatgattaaaggtaaaaaagaagcaggtcagctgactcttgtgcaccattatcgggtttatgagcgagtagctaatcaaatcattaatcggcatgactttctcagtgttgggcaccaaggacggcttgaagcacgactaagtgattatttagaccgccattataagcttgccggtcaaacgatctttttggccagtgacgctggcccaggttacgaaccagctaagctattaagtctagttcctcaaagtgcacatggtgaatactttctcgaccgctatcattgtttgcagaaaattgaacatactttaggccggcacaacgaattagccatgcgagcaattaaagccgttcgtcatcatgatcaagcagagctaacaataattttagatacttatgaatcacaaaacctaacggaaaaacaagcagatgacctaatgcgtttaagaaagtatctacagcgaaattggcggtatatcctctcaccacaaatgcgtggatttaaggatattcatttaattggttcagtcgaaagttctcaccgggcttttacttaccggatgaagaaacagggcaagtcatggactaagcagggggctaaagccatgattggtttaattgaagcccgaatgaatggtgaactgcaagctagtttaaatataatcctagaacaattaacagttcttcctcgagtggctcaaaccagcctattacaggaaatgcatattcgaactggagagtttctaagaaaggcaccgacaaagccgtcaattggagcagtacaaggaataattccgattaacacggccacaagtagaccaatgggacaactttttaaggcactaacccactaaaactgtatatttaaaggctacctatgaaaacttgacagataccttgattgatattctctttacgctttacaatttttttgttacaataatatagttgaaatggagacatactcaagtggctgaagaggacggtttcgaaaaccgttaggcgtgtaaaagcgtgcaggggttcaaatccccttgtctccttagataattaatcagaatgttaaagggttgttcaaattgctttatatagcggtttaacagccctttaatttatcacaacatttcaacatatatcactttttgttctcaaaatgttctcaatatcttctggctggcaagatacatatctacttatttaaatacatattccaatcgtcacaatttacgtggcgttttttatttatcatcacaaaaaaagttttctcgatttctggaaacactacccttggtttaattccttctctaacaaaataagatgatcaattacccgtctagtgatttttcatttcgtttgagagcaaaaaaagccggactaattaaagcccgactaaggaaaatatggatatttattctaccaaattaaaaataagaaagccattaaagactttaacccacactctacaaggtatgccatgttgtggacattgagtgccaaccaaacaataacattagtcagtccacacatcaaagaagccgttgtattcttgtccgtcacgactttatacttcctatcgcttaactaagcgacaagaaaacggttatactttatttccatataaccatcccctttccaattgaataaagctttctactatggtgactttgatagctatattctggaaggagtttacaaggcttgaaagaaaataaatactgtaatgctggctgtattgctccaaacacttaatgttcacgggaagttttactcacttcccgctattaattataccatacattttaggtatataacgcatcaatctatactagttatctatacaagcgcccgcaattgttgaatcatgcttaacacttggtaaggggtatttgacatgtcaatacctctattttgataccaaaattgcgccaacatctgaacagcgaacgtatattgttcatactgggttaagtctgctgtggggtttacagcgttttgtacataagccttagcgttctttagataatccttgattaattggtcttcttcttcaccgtcaagatataaggcttgcttaaagttgtctacttcccactgctctacatcaaatttcattaatttcaccttcttttagaacacatctaggtctaactttttagcaacatctactataaattgatcacgtaacttgtacgcttttgtagtgctacaccatatatcgccagttgctactaggttctttatcgtcttatgattagggttaaaatagcattctttaattatcttctgggtacagtccccagcgtcttgtaatgctaagtcaatagcttctttctcacgttttaagcggtgcatatatctatcttggtcaatggttattaacatatcatcgtaataagtccatggtcgattgatagcacgtccaccacctacattttcatctcttttgcggatagggtgcattagttcaaacttacggctttttagtttcttattaattgaaggataatctttcagtattactattactagactttttacttcttttcgcattaatacacctcataaaaaaagagtgggcgatattgcccaccctgtgctagtagctattatttactttcggtcgccttagttgtggttaaagagagattaaaagcagcgtcattactaattggttggtagtcattacggacgataacagataaaccttgactgtaactgtcgaacttgtcccattgggctgtaacttgattacgccggaatactgctaccgcttctgaaatatcacctaaaatcattggatgtgaaccgtctgtgttatctggtaagaacttattactaatcttaacaacgggttggccaagtaaagaaaatccactaggagcggttacatctggttgtaataagtaacgtccttcattgtctttcaaagtatctaatacttggaaagctgattgatttactaaccatgtagaagtactttgtaaggctgggtcaaggtcaacgttgaatacttgcttcaagtcgtcaacattagctacggttttcttagtaaagttatcgccttgtaataccttgataatttcagcgttatcagtgttatcaactaacttttgaagttggttctttacttcagatacaatatcaacttctgaatcgtcaacaacttcatttgatagtgcaatcttaccggcacgggtctttacatcaaacttcacatcttcaaacatattagcgtctacatcagcaatttctgcttgttcttccttagtagtaagtaccgctgtgttgtaacgggtagcgattggataatgaccggaaccagtccctacagtctttacagtagcgtactttgctaagttataagcactgttctttaagtctaggactggagtaacaacttcttctggaataacggcttctgcccccttagttgttaatccgtcacgggtttcaccacgtgaacgaatgaagctttcaaaggcgttagctggttgttctgtattgtttttggggtctaagattgtgtgttgcattttattatgttcctcactttcgataaattggttgtaactacgaatgcttgttttatctacatcaacatttgtctgatcatatgaaggcactgtaacggttgaaacctcaaataaatctttaatctgattaacggtgcgtgtaatttgtccgttgtcgtcacgtgtccaactgtcagaaccatcatcaacatcaaaacggaaagacatagaattaatgttcccattcttaacattattaagagtgtcacttgcgtaacttacacttgggtcaatagttgccttgaagtgaagccccttatcgtccacatcaagttgtaatgaaccagccttaacgcttgctagtggcttagtgtagtcgtgttgatcaagcataactacattggataggtctacgttatcaagggcgctagggtcaatcacttcaacaaaaccgcctaagtccttgctgggttgattaaagagtaacgcatagccttcaactgtattaggctgtgaggcttgcgtttcatcttggttatcttgctggtcttttgttgggtcttctttagggcttaccgtttgtaaacctgcgttagttgttagtcgtttctccattggctgtaactcctccttctttttcaataaaattatctccattagttaccggcactaaattaagtaaggctcgggcttcattgcgtgtgtagataccgttaacataaccatcaactgccatctgctgttgagcggacgggtcaaggcttaatagcttgctattatcaaagctaaaatcttgccctagcttgtagttcaattcagaagtaaagcaatcttcatagtgctgtaaagtaccttgtaaatactgaacgttactttgttgttggttgctatgctcgttttctacacctaaacgctcgggtggtagtccgaacgctttcgcaatttgacgggtattccagtcattagaatttactagctttaacacgtctgtattaagtggtaggcttttaacgtccataccatcatcagtaacaattgtgttaagtgaattattgccggtagttgcctcatcaaattgttttctaatgttctctttaccatccgaactaagatcagcttggtggacttggacaactgttgtgccatgaattccattattaaagaatccagtcattaacctgtttccagccgcctgtatcttcatttcatcttttagcgcatacagtggcgatagtccgactaaaccatcacgggtaaaatacttaaaatgtaagatgttagaagaggcaattactcgcttaatacgtccatctgggctgtatgtgtaagtcagcttttgcgttacatcatcttgctggacagttaatttattgttaggaataaaatttagcgtgtgtgaacttaaatcaatttcggcaaacgcattaccatttaatagcatttcaaccgctagggcgtacttgaaacttctgccgtccattaactcgttaggatgatcattaatcatcttgttatataggctagaactagacttaatcggattactggcaagatcaccagcgatagaactaattgcagcaaatatatcactattacgtaaagccgaagcactaacgtaactattagggtcattactagaaagacttactagagcgtctagaaaggggtcttgtgcgcttgtagtcgttgttctcttactaaataggcccattatctaccctcctttacttgtgattatcagaatagttaatcatgaaagctagaacaatcatttcaataccaagaaagccaatcccaaacaaccaaccggttaatcctatagcactgatctccattagaacgcctccggtgatcaacaaaaccggtttaatatagctagaaaagatttttagcagtttcatagtattcatttgtacgttcttgctcctttctcttagtgaagtaatcataaccagccgcccaagcatccataagagcagcaaggcaatctattttattttgctttctagtcttgtctaataacgcttgaccattaaagttatatttcaatattgcatttcctacgttgtaagctaacatctgattgttagtgtgaagaatgttaccagcaattaattcttccttaaaagtcccaattggtaccgataaattcttataggattgtgttaattgaagttgtggtagtcctgcccgttcaaaacgattaacaagatcagcccatttataagggtcaaatactaagaatttaacatttagattatacttaccgattaggtccatcacgaaatcatatacggaatcataatcaatcaagccactttctaatgaactgattgaacattctccacgtttagcagccatttcataatcaattccatcacgttttgatttagtaacaattccaccataacgagatacaaaggcgtgggaatcagcgtaaaactttccatcttctaacggaactaaccaactaatcgccgttaaatctcggctttttgatagatcagcaccaatataaacatctctattactaatatctggagctttttcaatcaatccatgttcccaatcttgcgtactaatatatgaattttcattctgctgtacaaacatattcatattctttacaagtacgttattaatattattttgttttgtggctacatctaaatcattttgaatgtgttccctcattgtcttagcaatcttaggattactcatcaaaggattagctttaatccacattgtggggtcgaatatttcttcttttttatcaagacaatacataaccgcaaagtaacgatcattcttaattttgccgttgagtatatcggctgcatagtcccattcatttttgaagggtgaattaagattaaaaccagcagtagaaataatcgctagaataccattgtcttgttgagccatacctgaattcaaggcgtttagaatagtgttatctttagcttggtgatattcatcgactacgcccagtgtcgggttataaccgtccgtactgtgggtatcagtagatagtggaattgcgaagctacctgtctttttgtcagtcacccgttgtttattgattttcactcgttgccttaaatactttgaattacgccgtaagttttctagttggtcactcataatatcaaacgcaaggtgtgcctgctgggaactgttagcagtaaatagtatttgtcgattacgggctggttgcttttccataagaagagacacaacgccaatcgctgccagtaagaagctctttccatttttacgggcttcacttaatagaatccgattgaagcgcaatgaattatcgtctacctgtcgccaaccatagatattagataagataaacacttcaaatggctctagcttcaatggttcaccgtttgtttgtggtaagctctcaacaaatttaataaccttaccagcatacgtttcagaataataataaggaaagtcatcggtcttttgctttttcatgtcgtctaagaagcgctggcaagcatgaataactaacttaccggcgattaactcacctttaacaactgaattagcatactgaatagctctatccattatgacaacatctcttcaaactcatcagtaggagcttcttcactcattgccttgtggacttctaggcgtacccgtgattgtgggctaagtgccatttgactatcaattgacttcatttctttaatagccttatcacgtgccatgtagtaaggtgactgctgtaatcctcgttttgtatcaataactaccccagtacgatcaatctctttagtacatttgataattgttgaatacaaagtacagtgagtagcgattaaactaacatctagttcgctaataggggcactcttctttaagagtgggacaattctacgccattccttttttgctacatcatcaagccatttaggggcgtgagatgttaagtttgggtattctgccaatgctttttcagcgtcttcacgttgtgctttttctgccttagtaatatgaccttctggacgggtcttcattggttgagccaactatttaacctccttctatttatttggtgacaccatgtcactatttgtttaaaaaaataaaaaaaacatcatttcatattcaattatcgtattatttaacccttattataccatatttgaatagtttgttaagttcaatgcctaaaagttataataaaaaatccttgacatttgaggctctaaattatttaataaagttgaaaagaaaaccatacaaaataaaaagaaacgtcttgaaatcttcggattttaaggcgtttttttgtaaagggagaatttttttaaaagaaacccccaccattacggctcctaccggtctataccaatagcgggggtattaaaattatttcagctattcatatttattttcctttctcgttgatgatcttttcttgtcttttctcggtgacaacgatagcaaagtgattgtagattagttgaatccaatcttttactccaatcttcacgtataggtacaatgtggtcaactaaatcagctttttttactattccctttcgtaaacacataacacaaactgggcttttctggagcgtttgacggcttaatttaacccacttactcgttttgtagaatctattatagtcatgaggagctttggcgcttctttccattcgctttttgtatacttttctattgtattcatgtttctgttctttggtcatctttttatagttatctcgttgccaatgtttacgcttgtcttcatattctttttgtagatattgatgttttttacaaaaatattgacctactggaatcacctctcgacaaccagcagcactacaaaaccttactacactcatttgataacctcctatgaaaaaagggcatcgcataacacgacacccttagcacttacttattaattaattccattgccttactatatgcttcaagcctgcttatgtgccagcttttaacatcgttaaccgttctcttaatgcaagcttcaagctccattgtatcggcgctgtaagggtcacactcgcttagtctataccttgccatcatcacccagtcttggcgactttcctctgcgtccttgcatactgccacttgtgcaatacactttactagctcttggttgtctggtagtcctagatcaatcgctaatggtaatggactgccatttactgagactaattttaaactataaagcgtagtatacatatgataattagaaggatcatcaccgcttgcctcaatcattacattaataaagttgttatactctgggtgcgtgttgactgttaatttactcatccccatttcacctcttatttatgactatcaagcttgcgtaaggttacaatatcatacgccaataactcatcatcaattgaccaaccagcaactttatagatactgccattgtattgtgcttctggatatttcttcatgtccgttaaatctttcttgtgacgaactaccaatataacatcatcagtaattgaactacctgcctcactaatagcttgactagcactgattgaatagttaccacaatgtactgtcacatctcctacaaaacctgtcatgatcataccagtattcgggttacgtttccccgtaccaccttcatgaccgaatgtgaccttatgctttaatcgtgtaattgcgtatttattacttcgcatttaattattcctttctgcctgtacttgcagatacaagcaatagtagaacgtttgcagccgttctagtgaaatctactgttactttatttttaactccttaataggcttttcacctatccggtggtatgtggtcactgcctcaaaataaaagtacggtaaaagcagttttaattgttaattttcatctcttcaattgaaaatagtttttacttttatcggttaccccgtttcaagtacccacaatcgcctttatatcaacatttatatggtaaccgataggatataaaggtaaccgatacattgcagttacttaatatagtaacccgaaactatcggttacctcaaaatgctttcggttacctttaaatagctttatatcaagctttataagaacttctgcaaaggtaaccgataaatataaaactataactaatttttaagagcaattcctttataacctttaacatttttaccgttaatcttaactgtagtgtgtttgtatcctcgtgctattagctctttcgcaaacttacgattactaagacaaggaacagcagtatttttacaatactctttgtaattatcatatagatatactgatttttctttatctttctcatttgtagtacagcaatcattaatccaattaccgatattgtcattagcatttacccagcttcgcttttgctgttccatgtattcagtcactggaaacttaccagaatcaagtgcttttttataagattttaagcattcataggcaaatgctggcatttctcttttaaagtcttgctctttgaattgctctttaaaatgtttaatcttatggaacgttacaataattggtcgtcttttaaatccgtctgtaaaatcattgaaggctggtaaatcattagcgctaaaaatcaatttagcttcattttcaagtttaaatggatctttatatttaaattgagctgttgtagtgtcgtcaccagttaatgttttaataatattagtctgttccataaatttggggcttatatcagcaaaaacattagcagctttatgatacagctgagaagtagcaaatttagcttctttttggtcggataatgcttctaaagaaacgtttgaaacgttaggcttccctattaactccattagtttatttagaaatgtagatttaccatccccacccaacccgtatagaatcatataaatttgaaagtccttaaaactacctgctaaagcaaaaccaataaaggcttttactgtttcaattgctgttaggtcatattcatcttgtagttttccagtatcatcacggatttctttagttgagggtactaatgattgttttaaccatttattccacgttgtagcttttccttttgtttctaattcatatggtctattttgtaaaagatagttctctggtgaattatcttctaaagtgtccgtcatcaagttgtaagtgtgtttaccaaacactgctttataaggtgctggttgatcaaatggattgtcttctacaatttcttgtgaatctaaggcaattaatttagaaaccgatgctaataagttcgttctccatattccatgaggtacaatttcatttttgattgatttttcaatgactgaatcagcgtaatttttccattgtctacttttaggatcgaaccaatagccgtgttctataaattggttggatgtaaagtgatactttttttctaaatatttagccaacttaatttcatcaaccagtttatttcctttatcacttacagttaaccattctggaaaactattgttatttactaagtcatcaatattagccatatttttcctctctttacatggtaatttagcgtttgtatttaagactgataatctctacttcgccttttgttttgatatattcaaagcttttcccgtctaaacttgtttcttcgtatatattgtcccaatcgactattgattgatcttcgttttgactagcattattccaatacttaaagagtggtgtacggtgcagtattcggttaacttgtttaacgtcatcccctgtgtagtagagaagataaaaacacattgcaccaatagcaggtttaacgctatgatatttatttaggtagtaggaaattatttcctcattatttttataaagagcaataaattttctactacttttactactaacagctcgttctataaccttgtaatcatcgttatagtattcaagtgctttctgaaactgtttctttgcgtactcattaaggggatgtgacgttgaattaataattttttccatcttgtcactatctaataaaggattaacggatagtttttcttcaaaacttaacactattaatcacgtcccacctattgcaattgatcatgaatttgatctaacttatccaacaaaatactagatagtgctaacaatgctttcttacgtgatactactgtttgagcaaccgtagacacttgttcatcactcattgctgcataattgtctactcgtacaattggagcaaaaacatcatttaactgatcatacagtgcttgggctattccggttgtttcttcaacattggaatctgcttcccacaactgattttcaaacgctagttcttggttcttatctttttccattgtttaaaccctccactcatgttagaatgaaagagaattaaatattagtaattcgtccaacatcccccgtaaagattgttggcttttttattagctaaatttaattctctaagttttatttagtcgttgttagtgtctgaattggcgttctcactatcaacggcttttttattaccatccataaagtcgttttcaaaatcagttaaagttttatattgaattgctaaatctttaatttctttagcgaccttaataatttcatctgctgaggaaatcggatcatctgcaattatttctccattttctttagtgatagtaccttcaaaacaatcttcagtaattgaatttatataactgccagctttaacaatcctgtcttctatatcaataattcttttacttaatatttcttattcaaattttttagtgtataaactcatttcttattactccttaaaataagttactaattgcaacaacaatacccagcaatggtaaaaacgttgctagataagcccaaaggcgttggtctggtgaagtccaccagtaagctaaaatcttaccatcaattttttgtaacatatgtctcacctcctcctatttatttctctacaatcacttgccagccagctgtgcgattattacttagaattttcttttacccaacggtcaacatcttcacgtttatatacatattttcctccaacctttgatgatggaaaatttcgggtcttaatccaacgatcaatagttgttcgagaaacacttagataatccgcagtttggcccttattcataaactctggttcggttttaacagtcttagcatcttgtaacttattgttctctagctttttagccacagcttcagctaactgatcaatgaactgatctaaaatagctgtactcattattatcacctctttatttcatatcgtaattacaatatataacataatgaaatattatgcaacaacaaaataaaatatattgtgttttgtattgttattttcggttatgtataatatattaactatacaaggaggaattaatgtgaaagaaatttcatctgaccagaaaataggttctaacattgcactaattcgtaaagctaaaaagatgactcaaaaagacttagcaagaaaaattggaatatcacaaccagccttggggaattatgaacgtggccagcggattatacctgcttcgatttttcacagtttacctcaaatattagatgttcctctagattttctagtctatggaattcccaacaatattacctttcatgatttagcaacgctcgattccgtatctctcaaaaagaaagctgctcatattgaaaatgatagaagtattattgaacgtgggttagggcgtgacgacataaaaagacatttattagctgctgttttgcttgataattatggttatcttgtgtacccagatgaatctagcaatgacaaagaacatgaacaacttaaaaaatttgtttggaatacattagatggattacttaccggcgtaccaattaccaatgaaataaattttaaacaaattaatgaacaatttgaattacttgcaaatacgtatttaagcctaattattgacgaagaggcaaatcgctatcctgctttccgcaaggatttaccacccttcaaagaaaaacttacacagtttttaaatgataacggatattttaaaattttaaaaaaataattttaaacctttctctacaatctcttgccagccagctgtgcgattgtaggaggaaagtaaaaatgtcagtatacaaggataaaagaaatggtacgtggtatgttaaataccgcattaatggtaaatcaaccagtaagcgaggtttcaaattaaaatcggacgctgtagcgtgggaacaagaaaaagctgtggagcttaaaaaatatggtcaaatgaataaccataacatgaccgttgaagagctatcaaaaaaatggttgccagtatatgaacagactgggatagaaaattctactattcataaaacaaaacaaatcattaaaaatcatattctaccccgcattggaaactataaagttgctgatcttagcattgagttattaactgaagttgctgctaaatggaaagaagaattagtaaagagtgacccttttaactatactaagcgaatgttagactacgcagtacaattaagagcgatcccaactaatccaatgaattctgtagtaaagcctcgtaaaaaacatgacaaaacatttactaacaataatttctttaatgaaaagcaacttcacaattttatcaagtgtataaaaaaagactacgaagaaaaaaatcctcgtgctttcatggttctatggttagccctttttactggcatgagaaaacaagaacttcaagccttgacgtggcaagatgttaaatttacaaaaagcggtggaataatccatattaacaaggctattaagaacgcaaaacatccctatcttggtggccctaaaaccgctaactcttatcgctggatttcaatagataaaaaaactgcttcctatctaaaaagatggaaacagcaacagatagatattttaactaaactaggttttaatccacaccaaaaagagcaattgattttctctacctacactaaaaataaaattgttttaggtgcagaattggacaagccgttaaataaagtaattgttagaaataatctaaagaaagttacattccatggattacgtcatacccatgctacacatttggcttctattggtacccagccaaaattaatagcagatagattaggcgatacaatggaaactgttcttgaagtttatattaatgcagatactgaaccagaacaaggaatcgccgacaagttcgccgatagtttagtataatgttctcaaaatgttctcaaatttcaattaaatatttttaaaaccctttaatatcaaggattataggagaatttttcaaattattagaagtccccttgtctcctttatctaaagttttgctgatattcaatcgttgttaaaacgttgatatatcagcttttttattacacaaaaaaggacacctattaagtgccccaatctgtcttgaactaatcttaggttatttagttttattgattagcaatatcgtatgtagttttgccatctttggccgtatacaacgcctgactagaatcacttggattcataatactaattgaatatccttcacctaatgctttttctacttgccctgaattgcttttaatcgacttagttaagttaggccagcccatttgttcagcctgacttggatcttgcgctaaagctttcaatgcttcaaccgtattatcatcagttggcgtgatctggaatgtcttactatcttcgttataatcaactgaacctaattttgaataacccttttgcatttgacgcaaaacagccattgtcttactttcttgttgcgcttcatttgcacttgaattgccaatcgctaatccatttgaaaatgatgaaaaactactggaccgcgccacttgtgaagatgaagtactttggcttgagctagcagaattattatgatgaaaataaggtaaattaatcacaccataaacaattgcgataatactcaatactacaataattgtcccgcttttccattcgcgatactgttgccatgaattagcaagataaaaaccacccaaaatcaaaaataaggctcccattattactaagaaaatcataaattaactggctcctttttatcaacgtaatgttattgtcccgcattcattttatatatacaactataatttaaaaagaaaaaaggctagtatccccagcctcctcctaattaaaattccattaatgccttcatatcgtaatctttaagcttatcgcgaccatgaagatcttttaattcgattaagaatgcacagccaacaacaataccacccatttgttcaaccatatcaattgttgcagagattgttccacctgtagctaagagatcatccacaacaagaacccgttgtcccggtttaattgcatcggcttccatttgcaaggtagctgttccgtattctaagtcataagatgcactaattgcttttcttggcaacttaccctttttacgtgctggagcaaatccaacacccagttcgcgagcaataggacacccaacaataaaacctcgcgcttctggtcctactaccatatctacctttttatccttagcataatcaactaattcgtcagtagcttgcttaaaggcagccccatcagccattaatggcaaaatatctcgaaagataatacccttttctggataatcaggaacactagctacgtatttataaaggtctaaagccatgagataaatagtctccttattctaaatttaaatatttcaataaccagttagcaaccgttgcagcatcattgaaaagcaactgttgttcaactttatattgtgctaattgtttttgataacgtttagtttgcgttaaatcagtcttattagttgactcattaaactttaacacatcatcttttattgtaacaaatcctgcttcagaaaacacttgaatcattagatttaatcgatccatattaatctttaaatgattgctaactgctttagcttgcatgggccattttaattctttttgcttataaataaatcgataaagctgtgcaaaatcattccgtgttggcagtccagctaaataggcactttttcgctgatacagtaataagcgaatagttgctggttcttcttcatcctctgcaaaaatccgttttagcatttcttcactagatgggcagtcaaccagcgttacttgttgaccagaaaaatcagtcttaattgcttcttcgatcgataaagtatagccaggagccacatggggagcaatattttctcgcaatcttggctctcttacaatgtaataatctgaagaactaaaaagctgaggagttagtttattcgttcgttcatcaataattaccgttccattaatttggagatcttctaacatcagttggacactttttttaccacgccactcattaagactaactttaacggctaaattaatttgtccggttggcgcggataatagtgttgccaaatttccttgaccaaaagcaacgactgttagattttttttatcacttacaatcgaaaattttaaatgctggtgttcctgtcccattgttttgacatcgacaactttaacgttatttaattcaaaaaccggttccatatttcctggaccaaatggagcaacccgttgaatatcgttatataactgttgggtaacatcagctggtacaagtttcattgcgattggaagaggttgctttaccgttggatcaaatttttgtttgactgcttcttcttccaaggctatttgcagaggtacaatatttttctgatcaaaagaaagaccacaagcagcagggtgcccaccaaatgttgtaaatagttcacgatgagcctccaaggcattgaacaaattaaaactgtcaacgcttctaccagatccttttattaaggtcggattattttgatcagttgatgcgacaattgttggctttccggtctcattcataatccggctggcaacaattcctaatacaccttgatgccaaccttttccaacaattaataaggtctttttctgctggttagctgaactattagcttgttcttctgcctctttcataatatcagcaactaggttctgacgttctttattcgcctgatcgacctctttagctaatttttgtgattcattctcatctaaactcgtcagcagcttaactccatcattagcatcagcaattcggccaagcgcatttagccgtggtgcaattccaaatccaatatcctgatcagttagattgttagctttaatatcagctaatttcattaaagccgctaatcctggacgcatcccctgtcgtaattgctgaatgccataggaaattaacgcatgattttcgtccataacgtttactacatcagctatttcaccaattgcaactaagtccagttcttcaacaggaaactcaccagttaaagcccaggccaccttaaatgcaacaccaacgcctgacaaatcaggaaaaggataattactaccaggatagcgagggtgaacgatcgcaacagcattaggcaagtcagcaggcaactcatggtggtcagtaattacaacatctactcctgcttccattaccttatcgataacattttttccgctaacgccattatccaccgtaataaaaagctgggtaccattgtcaataaggcgttggtaagcgtccatgttaggcccatatccatctgtaaaccgatttgggacataataattaacattggcaccgatagataataacgtttcatacattaaggatgtgctagtaattccatcggcatcataatcaccataaatagtaatttgttcttgcttttcaactgcctgctcaattcgctcaactgctttatccatatcatgcaataaggttggatcatggatctcttctatcgatggttcaaagaatttttttgcttgttcggttgaatcgattccttgctgagctaataaggttgccaatattctagaaatgcctaactctttttcaagattatcaacagttgctgaggaagcattatcggcaagttcccacttaaattttgcatcaatcatttaaaattaaccaccatttcaacgccaaaattaaacaagaggctgggataaactcagtctcttttattttgcccctttcattttttgaaaagactattaaattctgtaatctctcgaaaataagggagcatattataagttcttcttatcctgttggaaatcaaaaaattttttaattgcccagtcacctaaaccgggaataacttggtaagcccagccaagacaagccacatatcctggaacattaatttccctcgtcttatacccaacattattccaaattcgtcgagctaagtcttcaggagagataaatatccattttggtaaatgggcccgatacgtataattattatccgctttatcaaagaaaggtgtatcaattgggccaggattaattgtcaacacttggacaccataatcagcaacttccattcgtaaaacgttatcaaactggattaccccagccttcgttgctgaatatacagcgctatttggtgtaggtaatttaccagctaatgaacccatattaataatggccccatacccttgatccatcatttgtttagctacacaccgactaatatacattaaggctaagaggttcgtatgtaccattttttccattgagctgtaagattccttaactacgggaataaagtcaccaagcccagcagaattaattaatacatcgattcctcctacttcatgttgaaccttcgaaagcacatcatcaatctgatcagggtcggtgacatccaattgataagcaaatgctggccgaccagataaaattaaacatttcttggctacctcttgcaatttctcaaggttacgagaaacaacaacaacaattgcaccacgacgagctgcctcaaaagccaactctttgccgattccacttgaaccaccagtaattaatacaacttcatttcgcagaaaacgtaacgtctttactcttctcagcattttttgccatctcttttcattttttaaacggaatatcaatcacatcaaaatcattaacaactcgagtatcaggaataatattacgaacttgatatgccaattgataggctgctttaccggtgtatcgtgctgaaatatgatttaacaataattttttaacaccagctttttttgcaatttcagctgcttgtttgctggttgaatgataataattgtatgccatcttcgtctcatctttagcaaaagtactttcatgcactaatacatccgcattttgtgctaacaaaattgcattctttgtttgtctagtatcgcctaaaattgcaataattcgtccaggttgaggagtgccaataaagtcatgaccatctaatacgcgaccatcaggaagagtaaccgtttttccagcttttagttgaccgtaaattggcccagatggtactttttgttctcgtaatttttcaacttgtaattctcctggatgatccgcttcttcaatccggtatccaaaacaagcaattttgtgatccaactttcgtgcaatcactctaaaaccatgatcattaaatagttccccgtcatctgttatttcaacaaaatgcaaaggataactgaggcgtgactcacttacttgcaaagaagtctgaacataccgctttattcctattggtccatagatcgtcaatggttcggttcctccttgaaaagagcgggaacttagtaaaccaggtaaaccaaagatatgatcaccatgcaagtgagtaataaagattttttctatctttcgtggcctaattgtcgtattgagaatttgatgttgagtagcttctccaacatcaaataaccaaattgcgtttcgttcttctaacaaccgcaatgcaacacttgctacattacgttgcttacttggggaaccagcgcctgttcctaaaaattcaagttgcatttatatttttcctacctttgctacgtataattttattgaataaattcaaaaacaaatttttcaattcttacaagatcaccatcttgtacacctttagctcttaacgcgtcatcaacccccatatggcgaagttgacgagcaaagcgtaattgactttcttcatgagttaaatcagtcatcttaaataaccgaataagtttttcaccgcccaatacccaggtgccgtcttcatccttggtaatggtaaagtccgtctcatccttcttgtcaggagcagcagcacgatattcagcgaccaattctttatcatgactctcactatcaaatgcgggtgtcttatctaagagatcagccgttaattgcattaattgttggacaccttgatgagtaaccgctgaaatagggaaaatctctggctgcttttctaaagtcttatctgctgccaaatcagctttaaaagcagctaagttatcggcagaatttggcaaatccatctttgtcgcaactacaatttgtggtcgctttaataattcaggatcgtaattagcaagttccttattaatttgccggtaacgttcaattgcttgatgaggatcttcactactcatatccactaggtgaagaagaacgcgggtacgttcaatgtgccgtaagaacttcaatccaagaccgatacccttcgatgctccttcaattaaaccaggcatgtcagccatcgcaaaatcacggccatctggtagcattaccattccgagattaggagttaatgtcgtaaattcatatgcagcaattttaggcttagcaccggttactactgataataaagttgactttccaacagaagggaacccaattaatccgacatcagcaagcatctttaattctaattctaagtaatggtcttctcctggttcaccattttcagcaatttcaggagcagggtttttagcactagcaaagtgaatgttgccgcgaccaccacggccacctttagccactactaattcttggtctttttcaacaagatcaccaataatctcgccggtatcaaggtccctaacggtagtaccttggggaacagcaataattgtatcttctgcacttggaccagtcatctgtttactcattccattaccaccgtttttagctttaaaaattcgatgataacggaaatccattaaagtccgtaatccttcatcaacttttaaaatgatgctaccaccacggccaccatcaccaccagcggggccaccgttaggaacatacttttcacgacgaaatgctaccattccatcgccacccttacctgcatgtacttcaatttttatttgatcaacaaacatattcataatgattgtctccgttctttagtctattatttagtatatttaaaatttacaagcctgtcaaaactcaatcatgactactacccttagcaacctcagcatttttctgcaatgaaaccttgattaactgggcggtaggtcgattaattcctagtgaatggatttcatcaactgaggcttgagcaattttggtaattgatccatattttttaagcaattttgttcgagttcggggtcccactcccttaatttcatccaaacgcgagcttaacgaatgcttggtatgaacgcgccggtggaaagtaattgcaaaccggtgaacctcatcttgaatgcgttgaactaagtaaaagccttggctccgtggattcaaattaatatggtgatcatcatccccgaacaataagtcagcggtttggtgtttatcattctttaccatccctactaccggaatatcgagaccaagttcattctctaaaacatctttagccgcatccatctgaatttcgccaccatccataaagatcatatccggcattggcttattctcttttaagagacgcgaatacctccgtcgaataacttcacgggtactggcagcttcgtcagcatgattaatcaccgttttcaatttatacttccggtaaaaatttttagctggttctccattaacaaatacaaccattgcactaacaggatcagccccctgaatatgagaatgatcaaacgcttcaatccggtgaccttctggaagtccaagggcatccgtaatctctttcatcgcaccggtagtcttactttggtccatctcaagcagtcgaaatttttcatctaaagacaactgagcattttcatgtgccattgctaagaggtcccgtttttcaccacgaaccggtgtccgaactggtacccctaatatttcacttatttctttattgggaaggcccttaggaagaagaatttcacgaggcaaaatattattgcgacgattataaaactggagaataaagctagtcatttcttcaactgccgtatccacgattggaaatagacgtttttctcgtttcatcaaccgcgcctgccgaataaagaaaatttgaatagaaagccaccctttatccatatagaaattaaataaatcacgaggggttttatcatttgaaataatcttttgtttttcaactgtcacttcaatatagtgaagctggtctcgaatttcagcagctcgttcaaactccatgttttctgctgctagttgcatctttttggttaactgtcgcttaactgtcgctgtatttccacttaaaaatgacttaatttttttaatttgctcttcatattcgctcttaggaacgtctttaaaacaagctcctaaacattgtcccatatggtaatacaaacacggacggccttgatacccattacatcgtcttaatggataaaccttttgaataaaatgcatcgtctcctccgcagcatagacatttggataagggccaaaataatatccaccatctttttttattttactaacgatcttaatttgaggatcccgctcatttgttatttttatgtagggataaccagttcccttttttaatttgatattgaaataaggttgatgtttttgaataagcgttatttcaagtaagaacgactccttattagtcgaagttacaatggtttcaaagtccgcaacttctgaaaccattttagctactttaccggtgtggctactcttaaagtaagaccgaacccgattttttaaatttttagctttaccaacataaattatctgatcattaatgtttttcatcaggtagcaacctggcttgtcaggtaacaatgctagtttatgttctaaatgttcactggccatcgcaaaatccctccgaaaaattatctaacaatatattatatctgaaaaatcatcattaaggcaaagaaagtgtttagaaataattgtacatttagcaaaatttatgctagcattttgtcaaatataaaaaaggagctaaaaaaatgggattagttactagaagaagcgaacagcttgataaattatttgatcaatttgcggttgatcctaaaaaaccaaaagcaactaaaaaaaatgacgataaaaaagaaaaagatagcaaggataaagaaaagaaataatcgagtaggagataattgattagttcaattatcgacctctcacaccaccgtacgtacggttccgtatacggcggttcgacaacttaatcacattgaattgactggagcgtcttggacatattcataagtccgagttgttccagttttctattagttagagaatagctcaaggtcttactgtgtgcagttcgccagtagcccttgcgggtactagcgaagacatatgcatcacgctgggacagccccagcttctgtaagttagttaccttagttttaagcttcttccattgcttccagatatactgtcttattcgggccctcaaccacttgtcaaggcgttgaataaagtcagttagtttcccaattgagtagtactgaagccatccacgcatttttcgatgaatttcttcaaacattcttgtcagggatattccacgattacgtttagttaataacctcaatgctttctttactcgttgttgcgattgttttgctggacgggcgtaggctccattgtggtctacacccaacgaaaagccaagaaactttaaccgtagcgggctaccgactttggttttatctgggttcactttaactttcaatcgcttttcaagaaactgggtaatgcttcgcattactcgttctccggctcgttgacttttaacataaatgttacaatcatccgcatagcgcacaaagtggtgaccacgtctagtcaactctttatccaactcatttagatagatattcgccagtattggtgacaatggccctccttgtggggttcctttttcactcttagcgaaaagcccatggtctaagactccgctagttagaaacttacgaatgagccttagtgtccatgggtcatcaatatattgttgaagatacttaatcatcaagtcatgattaacattatcaaaataggcttttaggtctaagtcgacaactcttcgataaccttgattataaagatctactacttttgcaatagcgtcgtgagccccacggtgagggcggaagccaaaactattatcagagaaaacacgctcaaagataggtgtaagaatttgggccacagcttgttgaaccattcggtccaccactgttggtattccgagttttcttactccaccattaggcttcggaatttctacccgtttgactggtgctggtttatacttgccctcacgcaaactagcgatcaattccgtcttattttctctgagatatggcagaaggtcattgactgtcatatcgtcaatgcctgctgcccctttatttctcttaactcgcaaataagcctgattaaggttattgcggtccaagactaagtcttggatagtgacactcatacctttaccttcaccataatcggtactacgcgcccttgtgtactttcggttttccaaacctatcctcgacaagcggtcagcttgttgttctgttttctgcgattgtcgcacctgattacacctccgatataagttacaagttattgtcgttcagtccttcatctgattactcagactactatgacctcggctgacttctggcttactcaacgctacatcactgcaccgcttgtttctgtggaaattaaacttattcctcttgtcggaaacgtgtaggccagatctccccgggtaaggatattaactttcgtaccatgtcaccggtagctttactgaaagtaacttcgagtagtgttggactttaacttgtcatgcagtcttatccagttagttccagccttatagctacttcttgttcatcggtgcagtactttgccttagacttccttcagattccacctcgcagtggacacccttgtcctcagctcatggttccgactactacggcccatagcggactctcaccgcctagctaatacccatgccgggcgcacatgcaaaggaggctgggagaaaacttttgttttctcccagcctccactacttttatgaacaatagtaacgtggaactaacttcgcgtcgccacaaggctcgagtctaagtacgaacgataatcagcccgtgccgtgctaatcatcgccctagcttagccaactgctttgtcgagaaggctattttccactctctatttttaatcttgctttttaaaaccagtcggatagcgctgatttaattcctcaatatttgctttggcaacctcttcaaatggaatatcggcccattctgcaatttgagataaataccataagacatcacccatttcgtggattagttccttacgatctaattttcgactacgaaaagtatagttttttactaaatcaacgacttgtcctgactcaccagctaatcctaatgcacaatttgttaaaacttgttcattcccatataaggttcgttttgctgcattttggtattcattaaaatccaacttagttcttccccattcgctcttcaatccactgccaaacatcatctttaccccttttctctgtagctgaaaatagaataatcggtgttgaactctcaacatcaagggtctttttgataaggcttagttggcgattccatgcacttcgttttaccttatcaatctttgtccctacgattaatgttggaatattataatattgtaaccaattatacatatttacatcatcaggagtgggttcatgccgtgcatcaactaattgaataactccgcgtaattgttcacgttgggttaagtattgttcgatcatttttccaaatcgttctcgctcttttttcgagactttggcatacccatatcctggaacatcgacaaaatataccttatcctcaacgtcatagaaatttaatgtctgggttttacctggctgactagacgtatgagcaaaattgcgccggttgattaagacatttgtcaacgatgacttcccaacatttgaacgaccaactaaagcaatttctggaatatttgttttaggatattgttcatcacttacggcactgattgttaaatctacattgtgaacttccatttgcttacctcatttcattaagaagctttttcatcctttaaaacgtaacgaggttctgtatgttgcgttacacatcgtttatcaataattaccttttctacatctttacgacttggcaagtcaaacattacatcccgcattacatcttcaataatcgaacggagaccacgagcacctgtatttcgcttgattgctagttgtgccattgctcgtaatgcaccatcagtaaaggtcaacttacttccatcaaggcgaattaactcttgatattgcttaactaatgcattctttggctcagtaaggattcgaacaaggtcatcttcatcaagtttttcaagagcagtcatcacaggtaatcgtccaataaattctggaatcaagccaaacttaagaaggtcttctgggataacatgttgcaaaatatttttatccgtaacctcttcagcttctcgtgagtctgttccaaatccaattgtcttatcaccgagtcgttccttaacaattgtttcgattccatcaaaggctcccccaacaataaagaggatattcttcgtatcaacttggataaattcttgctgtggatgcttacgtcctccctgaggtggtacattagcaattgttccttcaagaatctttaaaagagcttgttgaaccccttctccagaaacatcacgcgtaattgatacattttcactcttctttgcgattttatcaatttcatcaatgtaaatgattcctttttcagcacgttctacatcaaagtcagcagcctgaagtaatttaaggataatattttcaacgtcttcaccaacgtatccagcttcagttaaagttgtagcatctgcaattgcaaacggaacatttagaattcgcgcaagtgattgggcaagataggttttcccagaaccagttggaccaattacggcaatgttgctcttttgaagttctgtatcattattatcgccactcatcattgcattaacccgcttatagtggttataaacagcaactgctaatgtttttttagcatcaccttgaccgattacatagtcatccagttcgttaacaatctctcctggagttggcacacggaaagcttttttagcttcatcttctgctagttcctgatcaataatttgtttacaaaggtcaacacattcgttacaaatatagacgccaggaccagcaacaatttttttcacttcatcttgggactttccacaaaatgaacagtgaactgaatccataccagtggtatcttcaaacataaatgaacctcctctaagacttattaaaacataataacaaaattactgtttaatttcgacaaattactcagtaaattattttctactttatcttactaatatttgattaaaatagcgaggctggaagaaaactactgttttcttccagcctcattgattagtaattatttaacaaattacttgtcagacttttcgtcatccttaacttgctttgctgaatcagcaactaagtcaacagccttacggatcttaatatcatgcattaacatgtctttagataatgccttcttaacagcatcttcttccataccgtattgctttgcaaggtcagaaatttctttagcaatttcttcatcagtagcatctaagttagcatcgtcaacaattgcttctaagacaaggttagtctttacacgttgagcagcatcattagcaaattgcttcttcaaatcttcttcctttgtaccagtaatttggaagtacatttgaggactgataccttgttgttgcattcctgctaagtattgttgcatttgacggttagtgtcatcatccaacattgcttgtggaatatcttggatttctgcattagcaacagccttattgatagcagcatcttcaatagcagccttagcttggttatccttttcttcttgaagttgcttcttagtcttttcctttaattcagctaaagtatcaacatcttcgtcaacatccttagcgaaatcatcgtcaagttctggtaattgcttttccttgatttcgtgaatcttaaccttgaaaagtgcatccttgccagcaagattcttagcgtggtaatcttctgggaaggtaacatttacatcaacatcttcatcagcgttgtgaccgattaattgatcttcaaaacctggaataaatgagcctgaacctaattctagtgagtagttttcagctgaaccgccatcaaattcttcaccgtcaacgctacccttgtaatcaataacgacagtgtcgcccttttcggctggcttatcttcttttaatacaagttcagcttgttgttgacgcttagtttcaagtgcatcatcaacatcagcatcagtaacagtggtgtcttgagcaggaacttccatacccttgtattcacctaatttaacttctggcataacgtcaacttcagcagttaatacccatggttgacccttttccatgctcttaatatcaatcttaggttgatctacaggttgaatgttagtttcctttactgcttcgttatatgcatcaggtaataccttgtttaaggcatcttgatacaatgattcttcaccgtacatttggttaaagatttgacgagggacacgacccttccggaagcccggaacagtgatctttttacgagtctcaacgaaagcttcgtcaattcccttgttaatagtgtcgacatcaatttcaaatgtcaatgtacctttgctggcatcgctatcgcgttcccattttgctgacattttatttcctccaataacaaatcaatttgactaattaatatttataactagtctttacatactatattagtttaccgtaggagaccagtaattgcaacttattgacggctgatccccaagttattttcaaatatttttgttaaagaaaaagacttgggtttccccaagcctttcagcacatctgtactcaaaaattagtctaagatgtcggatacaacaccggcaccaacagtgtgtccaccttcacgaatagtgaacttaagacccttttcaagagcaactggcttttgtaagttaacagtgaacgtaacgttatcaccaggcataaccatttctacaccatctggtaattcgatagtaccagtaacatcagttgtgtggaagtagaattgtggacggtagtttgagaagaatggagtgtgacgtcccccttcttccttagtcataacgtaaacttcacccttgaagttcttgtgagtttggattgaacctggttcagccaaaacttgaccacgttggatttggtcgtgtgaaataccacgaagaagtacaccaacgttatccccggcttcaccaagatcaagagtcttgtggaacatttccaaaccagtaacagttgacttaagaacgtcttcagttaaaccaacgatttcaacttcgtcaccgaccttaacagtaccacggtcaatacgaccagaagcaacagtaccacgaccagtgatagtaaatacgtcttcgacaggcatcatgaatggcttgtcagtaggacgctttggagttgggatgtagtcatcaataacatccatcaagtgaaggataactttttcttgttctgggtcaccttcaagtgccttaagagcagatccacgaacaactggaacatcgtcaccagggaaatcgtattcgctaagtaagtcacgaacttccatttcaactaagtcaactaattcatcatcgtcaactaagtcagtcttgttcaagaatacaacgatatattgaacaccaacctgacgagcaagaagaatgtgttcacgagtttgtggcataggaccatcagtagcagcaacaacaaggatagcaccatccatttgtgcagcaccagtgatcatgttcttaacgtagtcagcgtgtccaggggcatcgatgtgtgcatagtgacgcttttcagtttcgtattcaacgtgggcagtgttgatagtgataccacgttccttttcttctggagcagcatcaatatcagcgtaatcttctgcctttgctaaacctttggctgccaatacctttgtaatagcagcagttaaagtagtcttcccgtggtcaacgtggccaatagtaccaatgttaacgtggggttttgtacgttcataatgttctttttcagccattaatgaaaacctcctgataatttacaagtataatgccagatcatctgattcggtgactgacatacctttatacatattgtacaacttcttttcgccaattgaaagctttaatcttaggctctgaagaagaattcttaaatataatatcaactatctgttcatttgtaaatgtatttgactaatgtttttctattaattcgtcaatctgcttacctagtcgttcctgccacgtactagaaaccgtatttgttgcgactttctttccttctattctagcgattaaaacatctgtccattcatcaatatctttaataatttgattaattcgcggatataagaacattacctgtaattgaaattcttgaattgccatcttttctgtctgcgggttttgatttccacacttttctgtaattaatctcttaccttcactaacgactggcaataaatttaaaggctgaatatcagctggcacaactgtatattctctcttatctagccaataaacagtaaccggatctgcaacttgtaacttactaagcagctcaaccaaactagactttaccagtggatgagtgtagggatcacgaagcaggaatttagcgcctgtaataaattcatttaaaggaagtttaaaagccgcctgcagcctactttgctgctcttcaagggagtaatctcctaaatgataaaagtctcgcaaacgtgtttgtaatgtctcctggtactcttgacgagatttttcctcccccattgtaacaattgtcagcaaatcttcctgccattgcgaaagactactaatcatctgtcttgctaaaacaaataattcattttgacacaaaattttaatggcaatttgagcatctgccaagctatcaaacattacttctaaatactcaaacaagtaagtacaagccctggtatattgttgagaatgatacagagcgattatcgtcaatcgaccgatttctgaatcatcaacctcgtttataagatcttccagaatattactagcttcttgccatttttcttcagcaattaatttttgagcctggagatattgatcttgttggggttcgttcatttttatcacccttttttatttcattactttatacaattgttcataaaagcagttgaggctgggagaaaaacgaaagttttctcccagcctcccttcacattacttatattaaacagctacttcttttcttttgccattcgttttttaccacgaccacgatgatgctctttcgttgaacgtgacttcgcagatttctcttctttcttctcaacattgtttttaatcttcttttgatgttgattaatctccataataactggcaaaataactggatgccgtttagtttgatcaaacaagaatcggtttaatttatcgcgaacatcttgtttcaagtgactccaatcaaattccttttgatctagattttcttgaacaatcttttcaactaagtcagcactctgttgcattagttgacggttagtctttacaaacacgaatcctcgtgacgtaatttgtggtcgagcaacgatctttttctttttccgatcaatagttgccaccacaacaaaaatcccatcctctgacaggacgcgccgatctcgtaaaacaatattaccgatatcaccgacacctgttccgtcaatcatagtattacttacatcaatatgttctccaacatggaatttaccatttttgtaagtcagaacatcacccttattaacgaggaagatattttcttttggaactcctacttcttctgctaattccgcatgacgatctaacagacggtattcaccttgaattggaatgaagaacttgggtttcatgaaattcaacattaattgttcatcattttggttagcatgtccagaaggattcaaatcatcagaaataaatttaacctctgctcccgtacgataaatcatatcttttgtcttttgtacctcagtctcctgcgcataagaaggagtagtagtaacaaagacaagatctgtactcgttaattgtaaattaggattatcgccgtttgcaatttgctgtaatgacttaatcggttcacccattttaccagtttctaaaataacaacttggtttggttcgagtttttctgcttccttgcgactaataaataagtcatctggtaagtgtaactttcccaaagacattgctgtatcaataatttgttcaatgtcttttccagataaaacaatcttccggccaacggctacagcagcattgataatctgctgtacacgcataatatttgaagctacactagcaacaataatccgaccgttttgatatttaaaagtttctttaatatagtctccaatatcttgttcacgagcagacgcacccgtaattccggccccagcagaatcacttaaaagtgctaatacaccttgtgatccaatttccgctaaacgagcaaggtctgtttgataaccctttttagctgtctgatcgaatttaaaatcaccagtgtaaacaatatttcctgctttagtttctaaaacaacccctaaagtttcaggaatagtatgggtcgtctggaagaatgaaactgtaacatcattaaaatcaattgctgttgacgcatcaacaacatgaaaatcattaaacttcttaacttccttatggtttttaactgccagctttgctaaggcaatcgtcatctcgcttccaaataccggaacattaaagtccatcaagaaatacgggagtgctccaattgaatctgcatgtccgtgtgttaagaataccccgactatcttgttcttatgttcacgaagatattcccagtcaggaatgacaacatcaattcccattaattcattctcaggatactttaaccccgtatccaaaattaaaatttggtcttcaatctcaacggcgtacatatttttaccattttcgcgtacaccaccaaaaggaataattttaatattattatccattgatttggctcctttaatatttagttttgaaccccttatcgattacaatatgtagcgataagaattttatatcgttcattatagttataaatatcttaccacaatcagtgaaaataatggagtaaaaacaaaaaacaccttgcctccaagtagaaggcaaagtgctttgataataaaatattaccgacgtaaacctaacttttggataagttcacggtaagcaggtaaatcagtccgacgtaagtaagctaataagttacgacggtgaccaatcttcttcattaaaccacgttgtgaatgataatcgtgcttgtgtgtacgaaggtgatcgttcaattcgttgatgtcagcagttaaaacagcaacttgaacttgagtagaaccagtatctccttcgtgagttgcgaattccttaataatttgatctttacgttcttttgaaatagccatgctattttcccacctttcaatattaatgcgcctaagatctaagtataacgtcggtgaggatcgttaaactgagaagaggcaattaattacttgtttgaagtaacctatacaaatatacataaaatttactaatgttgcaactatttctatgaaattttgacttgatcgtcgttagctattgcattgctcgctagtcttttgtataatgacaaatgttgaaaattctggtcaactgaaaatcgggtaacggaggtgaaactcatgccaattatcaaatcagcaattgaacgtgttcgtactagtgaaaaagctgaagcacgtaacgcttcacaattaagccaaatgcggactgctattaagaagttcgataaggcaaagcttgctggcgcagataaccttgacgacttatacaaggctgctatctcagcaattgaccgtgcccactctaagggccttatcaaggctaacaaggctgcacgtgacaagtcacgtctctcagcacgttacgctaagtaataaaaaagcaactattaagttagttgcttttttatttttaacttttcgcaaaaagaggataagaaaacaaattttcttatcctctttttgtatctcatgctcctttgctctgctgagaatactgtaacataaataactgaaacaaaagtgaaggatcgcgttgtgtcgtttttaacgattgttcaatacgaattaatcccaaataggcgttttctaacgcctgcattgagaaatcacgcgcagtttttaatcccaatttaatccgataaggatggacattaagctgactcgctagactcccttgcgtaaggccgcgtttacttaatacttttatttgaatcaacagccgaaactgccctactagcactgcattaatccttaacggcggttgctggcccgctaatagctgttgatagagatctaaggcctttatttgattatgcttaagaaccgcagtgactaaatcaaatacattttcatctaatgattgcggaactagagcggctaccatgttttgatcaatctttttttcatggtaagccaaaatctttaatttagttaagcttgcatccatcatcccataatccgcattagtccgttgaaccaactcatccaaagcagcttctgatatttcaaaaccagcagttgataattgagttctcactctttgacgagctgctcgttcatcaagtggactagcatcaactaaaactgctgtcttctttaattgctttacaatcccttttcgtccatcaagcttttcataaggggccgcaaaaactaaaattgtagacggttcagggtgttcaagatacttttttaagctatccaaatcatgttcaactttcgaatgtcttttctcaccagttaagaagaacggtttattgataataactaatcgtcgttcaccaaaaaatggagtcgccatcgcatcatccaaagcaactgccaatggtgtggcttccatatcatatcgaccaacattcataacctgttcattctctggaataaggcttataaaggcatcaattgcctgctgttgaaggacctgttgtttccctaaaattaaatataccattgctggggttttagtttttaattgtgtagataattgggcaatgtccaacttgtctcatctcccctcaatgttgtttttatttttccatttcgaccatggtatacatattgtatcattccaaattgctgcgttgataagtaattaatatttaatctttgaaaattttttattgttatttcatcaggatggcgatacctattaaatcgtccagctgaaattatcgcatacttaggagcaactgtctgcaaaaataaataactactagcagttttactgccatgatgaccagcttttaagatatctgactttagttgcggatacttttgaataactttttcttcattttcctggtccaaatccccagtaaaaaggaatcttttcccaccaaatttcccagctaacactaaagaatcttcatttttcccttcacccggaacaaaaggatgtagaatttgcaatggaaatgatgacaacttaacattatcagtcaccggaattatcattggcgatgacttttcagcagtccttactttattaagaagtgctggttgtctttccatccccgctgggacaatcagtcttttcactgctatattatccaaaatcgttgttaaatagccgatatgatctgcatcatggtgagttaaacaaatattatcaatttgcctgatgcctttacttttcaaataattaatggttattcgttgggcatcatcttgagaatgctttgaagtcgcccaatccggctttttaaaatttaatttgcctcctgtatcaatcattgttacccgtcgattaaaaggttctctaataattatcgagtccccctgtccaatatcaacaaaggtaacttcgccattaagtggaaaatgaattatccctccagtaattacatacaataaggctaatatcttccatgattttaaagatgtctcttgagaaataacaaataaagatgccgcaaataatagaagggccaaaattaacggtggcttcccaaaatgaatcattcctggaaaatcagataaccaatttaaaatatattgaaaacattttaaaccagcattaattagatacgcgagtggttcaaaaagcttaaaactaagtgccccaaccaagaccgctggaaaaacaactgtcgaaaatagcggaattattaaataactaaccccaaaactcagaagatgaacctcatatacataactcaataacgaaggcaaactaattaaattcaataataaagactgcttaaaaccacgtactgattctggaagaacttgaagaataaaagaaagcaaatagcttaattgaccgcctaatgtaagcaatagcaacggatcaataactaatccaattaataagctcagtgcccatccatcaagactgtccaaatttaaatatcgatgaagaagaccaagctcagccataatggttgctcttatcaagcttgttgctccaccaccaacgagaagataaaacggtaaaatgataattaaaaataaatcaattgattctttacgccaccataaatgaactaacagccgccgtaataaatcagtgaaaagcacgatatgcattcctgaaatgcaaaaaagatgaagcagaccaagccttttaatacttaccattaattcagccgaatcctcattactgctaccaattattaattgttggcaatacgtactaagaggaggcggtaaagtttcaaagtagaggctgattcgctttcttaatgtatgacaccagccaactattcctcttttttgcctaaccatttgctctacccggttaatttgaacttgattacagatccggcgatggtgattataagtcaaattatcaaattgattttcatttgtacggggaataatcggttttaattgcccattaataagccatatcgagggtgttgtaagcttatcaatattttttagcatctggggtgacttaaacgacatcattattgcttcacgttgtccagtttgaatgtcgattgcagttcctgtcataaaatttccattgaattttaattcatcagggtaaactaatattttttgagtaacttccatttgcttattcgccgtaatagttgtccaatttttttgtaaactgtaacataaaatcgccatcaataaacatatcagcactccaactccaagtactattggcctttttaatacggcaattcggtaaaatatagcaattaaaagaaaaattaaccaatatgaactaaagaaactaaccgctactaaacttgcaattagcgcaggaaaaaaccaaaagtgttgaataatctatttttgatctgggttgatatactggtccagatcgacctcttctaaaatatcactatctaatttaatctgatgaagcgcaacattttttagtttaagtaatttcattgcataatcatcattgtgataattacgaatataatttatctccttaattccagtctgcaataaacttttggtacattgtaaacaaggaaaatctgttacataaatacttgccccatcagcagaaataccaaacttagcacactgtaaaagagcattcatttctgcatgaatagttcgtacacaatgtccatcacgtaaatagcagccttcatcaatacaatgtgcatcgccagcaactgatccattgtacccaccggcaattattcgcttatcacgaactaaaactgcacctactgaaaggcggttgcaggtacttcgcgacgccaataaagctgcttgaatcataaaatactggtcccaatcaattctcggtttcatattatttcactcctctatatttgaaatatagtatagcaaatatcttcatcaaaaaaataaaaactagatagataggtgatcttttagtttagcaacagttttttcgccaaaaccatttatttctttaagttcgtcaatactcttaaattgaccgtgttcttgtcgatattgcaatattaaatcggcttttttatcgccaatccctgtaatttgacatagttgttctttggtagccgtgtttagatttatctttgcagaactatcgctgccattttcattattagctgctgatggttctgtactgctggaaactattggcgtttcgccttgaagaggaatatagatcatctgctggtctgttaattgtttagcaagatttacttggcgcaagtctgcattgggtagtggtccacctgccgctttcaaggcttcgttcacacgatcatctgctttcaattcataaactccgggcatttttacggcaccctttatatcaattgcaacggtccctttcatcgtagtggtagaagttaaactacttcctgtttcgctacttgttaaaacagcattagtatttgaaattaaagcatcgttattatttttattaagtatccaatatcccccaactactgcagcaatcactatcatcagcacttgtactcgatattttatccataattctgataattgctgcatgtttctcacctccctataaatataaatacgaaaaaaaataaattttgcattaaaaaaagcaagagaccttcattttgcctcttgcttttcaatttacttatgcgtttgtaaatatttcactgcttcgtcaaaggaagtgacagggacaaccttcattcctggtgcatatttcttagctgcttttttagccatttgataattagtcagatgaccttcttcatacttaagaatctctttcgttggttttatataaggggcaaagaaaatagtggctcccgcacggtgcgcagcgattactttcttgtcaattccaccaatttctccaacggtcccgtctgaatttattgttccagttccagcgattttacgtccccgttgcaaatcttttccactaatttgttgatatatttgcaaactgaacattaagccaccagatggcccgccatattgaccagcatcaacctttactggaaccttagtcttaacttgcatattgttagtaagaatgatcccaattcctggcttattagtattggtaattttaacaagcggatgggtgacagttttagttttcccatctcgagtataagtaaccactaacggagtgccaacttttttagcaccaatatatttttgaaagccttgagcggtattaaagtgatgaccatctacttttgtaattgtgtccccaacatgaatatcatgtttaaatttagaattaggctgaacttgcaatacataaattcctagatagcgtcgcgttactttttggtgagcggcattataagcaactgcaattgcctcgttaatcgagctatccatataaaatttttggacacggtcatacgttgcactattttgaccaccagttacatcttccgcactctcaattgacatatagggcatcattttggcatataaatatgttgcaggatgggcacgttgaatcgccaccgacgtcaacataaaacttcccttatatcgatcggggtgtccctttattttaacaaaagactgtaaatcagcagctgttcccggactttcaatataagaatttaggggccagaacaaaaagcagcctagtaaaaggacaagccctaaaataattcctatccgtcgcaatattacattatcttgctttttcattgtctttcttaacccgtaacatttctcgttccattaaacgcttttttagtgcttcattaatattagcgggaaggtaagctgagatatctccccagccgatgttacttctttcagcaaactactagataagtgctgatattcaggcttagcaaggaaaaagacggtctcacactgatcatctaaaaagttattcatcgccgcaatatcacgttcatattgaaaatcagtagtattacgcaaaccacgcattaagtaatctgcaccaatgcggttcattagatcaacagttaagccttccgttgtaataaccgaaacattatctagcccactaacagcctctttaatttgcgctactcgttcttcaacagtaaacagcgggtttttactttcattagtcattaccgccactgccaattgatcaaacaacgcacttcctcgcttaattaaatctaaatgtccaagtgttaatgggtcaaatgatccaggaaaaactgcaactttcattattttgattctcctttatattgataaattgttaaaaccgtaattccatattcttgacgacgaataaagttaaactcagctaaatctgtcggcagtttcgcattctgatctgtttctgccacaattattgcatctttagctagcaaattatttttaaccatctgctccatatcattaacaatttgctgtttagcatagggcggatctaaaaagaccaggttaaatttcaatttgtcttttgcaaacaaattcaacgctttgtgagcgtccattttataaactttaaattgttcaacatgttttgtaacgtcaatattcttcttaattgttttgattgcttgatattgacgatcaactaagactgcctgactgattccgcgcgatacagcttcaatacttaatccaccgcttccggcaaacaaatctagactggttccgccattaaagtaaggaccgattatattaaataatgcttctttaactttatcagttgttggacgagttgccattcccggaacagcacttagctttcgtccccgaagtctcctgcaacaattctcattttttatcatcctcatcatgtaattgatagacccctgttaattcaagatcagctaacgtcgggtctaaatctggccgagctgataattcaacctttttcactgcgcgtaatcgacttatcttctcttttattttttcgacatcactttggtctacatacattaccacataatgcattcgtcgggaaatataatcaatctgaccataatgacgaagagctcgaatcacacgattattgttaatgtaaattattagggaacgccgtggaattaatttaaacattctttacgcctcctgtttcaggaataaatggtttccccataaccaagcgatcccgattttgctgcatactaatattcattataatgcctaccgttgcagaaagaatcaacatacttgatcccccataactaataaatgggaaggtaacccccgtaatcggcaagagtcctagaactccaccaatattaaagagtgtttcaatcgtaaagaatgttgctgagccataacagatgagcgtttgatacaaactatctgcccgcaccccaacttgaataatacgacagatcaaaaagagtaaagtaactaaaattgccgttactccgactagacccaattcttcactagtaattgacataataaagtcggtattgggctctggcaaatatcccattttttgaatactatttccaagtccaaccccaaatacaccaccattgctgattgcataataggaattaactaattgatttcctgaaccactagcatttccaaagggatttagaaaggcaacaaaacgcgcaacttggtatccaccgccttgaagcaaaccactttcaactagtcgttccaatccaaggtagccaagcgctggtaagacaagaattatttccaaaccaacgccccatttataatccgccgctaaaagcatgattgcaataatcgctccgttaatcgccattcctccaatatctggttgaatcataatcaacccgagaaaaactgcaattatgagccaaggacctttagcatcagtggtaaaatgttgtccacgttgcctaattttagccattcgatcagctaaatataagataaaatatagcttacaaatttccaccggttgaatattaaagaagcccaaggatatccaacctttagctccgttaacagcccggctaaaaaccaaaacaatgacaagtaaagcaccaactaccaatgttgaatctcgtaaaaaccttggcgttcgataatgccgcaaaggataatttgccataaatgccattaccgcaactcccattacaacatagattgtttgttttactaaatatcctaatggggttccaccattttgcatttcaatggaagcactagctgaatagaccattacaattcctactaaacataaagcaaggtaaggaactaaaatataataatcaaggtagcggacgttattccatacagaacgaatcttacggaatcttaatttctttttcttcacaaagtgcacctacctaaaaacaaaatacaatcattattatacaacaaaaaaaagctcggaaagctagttagcctcccaagcttttttaaatatttacttccgtgaagcagcacgacgacgcttagcttccttttcacgggcatttgtgttaagggtcttcttccgtaaacggatattttctggagttacttcacagtattcatcttcatttaagaattcgagtgattcttcaagggagaagtgagtaggggtcttaatgtgagccatttcatcagaaccagcagcacgaacgttcgttaagttcttacccttggtgatgttaacagtaatatcattttcacgactgttttcaccaacgatcataccttcgtaaacttccgtacctggatcaattaataattgaccacgactttcgatacccatcattgcgtaagtagtagccttaccagcattcatggacacaagagtacccttttgacgaccagggttccagttcttgataactggtgcgtatttttcaaaggtatggctcatgattccgtaaccacgggtcatagtcataaattcagttgagtatccaatcaagccacgtgatggtgctaagaagataagacgagtttgaccattttcgcctggttccatgttcttcatttcacctttacgtttagaaaggctatcaataactgcaccagtatattcatctggagtatcgatttgaacttcttcaaatggttcactcattactccatcaatttcacggtaaataacttgtggacgtgatacagataactcatatccttcacgacgtaatgtttcgatcaagatagaaaggtgtaattccccacgaccagaaacagtccatgcacctggatcatcagtatcttcaacctttaaggacacatcagtttgcatttcacgcttcaaacgatcttcaagctgacgggcagtaacaaatttaccttcacgaccagcgaatggagaatcgttagtccggaaagtcatttgtaatgtaggtggatcaatccgtaatggagtaattgcttcgggatgttctgcatcagctacagtttcaccaacattgatgtcttccatcccagaaaccgcaatcaaatcaccagcttcagcttcattaatttccaaccgcttcaaaccgaagaaaccaaaaagcttagtaacccggaaattcttctttgagccatcaagtttcattaaggtaacattatcgccgaccttaatcttaccacggaagacacgaccgataccgattcgaccaacgaagtcattgtaatctaagatagcaacttggaattgaagtggttcatcagaattgtctactggagcagggattgtcttgataatagtatcaaacaatggcttcatggtgtgttcttgagtagaaacatctgaatcataacttgaagtaccgttcattgctgaagtgtaaacaactgggaagtcgagttgatcttcatctgcacctaattcgataaagaggtcaagaacttcatccacaacttcttcaggacgagcacctttacggtcaaccttgttaatcacaacaattggtgttaagtgttgttcaagggccttcttaaggacgaaccgtgtctgaggcattgtcccttcgaaagcatccacaacaagtaatacaccatcaaccatcttcataacacgttcaacttcaccaccgaagtccgcgtgtcctggtgtatccaagatgttaatttggtgattatcatatttaacagcagtattttttgaaagaatagtaataccacgttcacgctcaatagcgttagtatccatcgcacgatcttcaattgagaagtgttctggtaaagtatctgattgcttcaacatttcgttaactaaggtagtcttaccgtggtcaacgtgggcaataatcgcaatgttacgaatgtcgtcacgagttttcaaaacttgattctccctttcgtcatatcatttttaagtcgaacagcagcggcctatcaatcgccaatttcataaaaaaactgtgacatcgcggtcacagcctcgacaactaattgatgatctgtcgaatatctcgactaacctgcctcgttgctactaatacaagattagatgataacacattaatagaactaccgtcaattgatttcacaactaagtctaattcttctgctaacattcgcccagcagcaaggtcccatggcttcaaattagagatatatccacctaattgaccagtgatcacaccaatcacctcaatgcccgcacttccatacatccgtaagcctattgcgtcttgagcgattttctttaatgctgaatcaccacttaaagttaatgtccgattcatcgctaacaaactctctcgcaagcctaagtcagctggctggccaattttttggttgttaacataaacaccagcaccctttcgaccatggtaaagacgattattaattacatctaaaatatagccaagcatcggttgaccgtcaacatacaatgctaacataacagcaaaattattatgctgcttaacaaaattcattgttccatcaatcggatcaacaatccaaacatgtccttgcatattgcttatttgtttgtcgccaaatccttcttcacttaaaatttgactatcaggatcaatttttcgtagttgatcatttattaattgttcattttcccggtcaattgtcgttacaaggtcagtataattcgtctttgtatcaatctggtaatcattttccattttctggtatgcattttgacctgcttgacgaattatttgttgtgctttttgatctaactcttcaatactaatcatttttttgcctaaccatcttaattcgcttatctgttgactcttgtgctgctttgacaacacggtagagaacataacccgaattcttttcaaattcgcgacccaattgtttctcttcagcctttgagggaacgacttgcttaaaggcacgataacaatctaaaattttatctctatcaatcgcaacttcataagcatcttcaaccgccctaaacatggcaattaccgtttccatctctttagttgtccatgatagatcaaggggataactatagttatgtgaattcatttttttgtccctccaatcattttctacttgtattatacaatccaaacggaaatttaggaataaaaggcctaaaagaatccaaacagaaaaagttcttagtgatttcaaaatcgagtcatccatcactaagaacttttctaacttattaaaatttaaatatgtgttgggaagccaagcgcaatatctgcagcttcttgaacaggttcattcaatgttgggtgtgggtgaattgttaaagcaacatcttcaacattcataccacagttgacaatcaatgaaagttcaccagcaaggtcactaacaccaggaccgacaccttgagcaccaataacatttttcttatctttagtgtagattaagcgaataaatccttcggcagcatcaagagaaacagcacgggcattaccggcaaatgggaattgagcagtagatacatcaattcctttatctttagcttcttcaaccgtcataccaacttgagctaattctggatcagcaaaacaaaccattggtactccaacccaatcgttagcagtattcttaccagcaatggcaccagcggcagtcttagcttcaaagaatgccttgtgagcaagtgcaggaccaggaacaatatctccaatagcccaaataccaggtacattcgtccggccttgttcatcaacaattacttgatgacggtcgtttaacttaacatttgtcatatcaagcccaaaatcatcagtatttggtttacgaccaacagataccatgcagtagtctgctttaatgctcttttcgctaccatcaacttcataagtgacagtaacgctattttcatcttgctgagaatctttagccattgccttagttacaatgtctacgcccttcttttcaagattcttgacaacaatatcaaccatatcgtggtcaaatccaccaagaattgaatcagtaccttcaataatcgttacatgagcaccaagatcagcataggcaccagctaattctgtaccaatgtagcccccaccaattacaactaattcttctggtacttccttaaggtttaagccaccggttgaatcaataacacgaccttcaaacttaaaatgaggaatttctactggacgacttcctgttgcaagaattaaattcttccacgtgatagtacgaccattatcattatccatgaattgctttggaccaggcttgattacacgaagttggtggtcattatcaagaattgcctctccatcaatgatttcaactttatgcttcttcaaaagcatcttaactccacgaatcatacggtcgacaactttatggtccttccattcttgagtcttagtaaagtctagctttgcatcggttttagaaataccataaatagatgagtctaaagtttcttggtaacggtgaccagcagcaattaatgctttagatggtacacatccaacatttaaacaaacaccacctaaacctggttctcccttatcaattaaggtaaccttttgacctaattctgaagctcgaatagcggctacataaccaccaggacctccaccaacaattactgtatccttttgttcaacatcagccattatctagccctccatcatcaataattctggatcatgtaataacttgttcatgtagttcaatgcatgttgtgcaagtccaccatcaattaaacggtgatcgtaagtcaatgataacttcatcattcgaccaacaacaatttcaccatcttcattaacgtatggttccttgtcaattcgaccaacaccaagaatggcaacatctggttggttgataacaggggtgaaccagccaccgccaattgaaccaatattactgatactgatagtccgaccagccattgattccggacttagcttgttatcaaaggccgcttgagtattttcggtaatttcttttgcaatctcaaacatgctcttagaatctgcattcttaatatttggattatagagaccgtggtcagtgtttgtaaggatcccaacattatagtagtgcttgtaaacaatttcttgagtagaatcatcaattgaagcatttaattctgggaacttcttgcatgtggcaactaaagccttaataatgtatggcaagaaagtcaagtgaatatcttgttctgcagcaactgccttgtacttcttgcgactagccattagagcagatacttcaacttcatcaaatgatgtaacatgtggcgagatatcctttgattcacgagtagtcttagcgataatcttccgcatattagacattggttcacgttcttcaaggtcggtattccatggcttgattgtattaccagcggtcttagctgcaactggagcagtcttagctgacatagctgcactcttttcttccttagctggagcagctgacccattaaagttatcaatatcttctttaagaacttgaccgtggttaccacttggttgaacaagtgaaatatcaacacccttatcacgggcatattgacgaacagaaggcattgccattacaagcttgtttggttctgcaagtggagctactccaccctttggagaattatcttctgaaggagaatctgcagctggagccgtggatttttcactttcagtagcttcttcactgcctgtatcagtttcatcatcgtcgtcttcgctttcgacgtttgtactaataccaggcttaccatcatcaatttcagcgagcttgtcgcccttttcaacgtggtcgtcttcttttacaaataattttttgacagttccatcaactggggataccaattgagtagtcgatttatcagtttgaatttcaattaaaggatcatcagctttaattgcttctccttctttaacgagccaagaagcaacatcaccttcagttaatccttctcccatttctggtagtctaaaaatgtatgccatatcgtattaacaccctttctattccgcacttttagtaattaattacttctcgtacggcatcctcaatatcacgtgcacctggaagccaaacattttcagcttgtgggaatggatatactgagttaggagcagcaacccgggtaacaggagcatcaagatacataattgcaccttctgaaatagctgatgcaacttgggcaccaacaccagccatcttttgcgcttcttgaacaatgactactctgtgcgtcttcttaattgattcaaagatcgtgtcagtatcaagtgggtaaagagaacgtaagtcgataatctcagcagaaatattgtccttagctaatttcttagcggctttttgtgcttctgatacttcaccaccataagcgataattgtaacatcagtaccttcttgaacaacatttgctttatccaacggaacagtatacttgtcatcaggaacttcacctttgactgaacgatagagacgaaggttttcaagaaaaagaactggatcgttattttcaattgcagaaataattaatcccttagcatcataggcagaacttggtgcaacaacccgtaatcctggaataccaacgaagaagttttcaagatcatccccgtgtagttcagcagtatgagtaccaccaccataaggagtccgaatagtaattggtgcatgcttagtcccattgtattggaaacgtatccgtgacatttgagcagcgatagaatccattgcttcaaaagtaaagcccatgaattgaatttctggtactggacgccagccagttactgctaaaccaattgacattcctaaaatacctgattcggcaagaggggtactaaatactcgatcaacaccgtatttttcttgaagcccattagtcgcacggaaaacaccaccgtttttaccaacatcttcaccgaatactaaagtcttaggatcttcggctaaagcgatgtcaataccttcagtaatagctttgatataagtctttttagccatgattacttcgactccttttcttcgtacttcttaatttgttctttaatgtctggagttggtacttcaaacgtccgcttcaacatatcgctaactttttcaggttctactgagtctgcttctttcattgcttctttaaagctttgtttgcattcatcagcatatttttgttcttcttcttcagaccaaagcccctttttcgttaggtacttgcgaagacgaatcaatggatctttatcaaaccatggctttgtttcatcctcagtccggtaacgagtaggatcatcacctgctgaactgtgagcaccaaaccggtatgttaatgtttcgattagcactggtccattaccagcagcagcaaattcacgtgcctctttagcaacttcataacatgcaaggacatccattccatcaacttggacacctggaattccagcagcaacagccttttgggcaattgtttgtgtttcagtttgtagctttcgtgggaacgaaatagcccatccattattttgaataataaatacaccaggtacttggaatgcaccagcaaagttcattccttcataagtatccccttgtgagcttccaccttcaccagtgtaagcataggcaacagtgtccttttcaccattcttcttaattccaagagcaccaccagccatttcgaccatctgcgctccgataataatttgtggccggagagcacgtgcatcaaaaaggttacctttgatgtgtccctttgaccataagtacatttgagcaacagttgctccatgttgaattaattgtggcaaatcacgataagcagggaaaaggaagtcttgcttcttaaatgcagcagctgttcccatttcagaagcttcttcaccccaagttggcgcatagaaacctaatcgaccttgctttgaaaaactcattgtttgttcatgcaaggcacgtgcccaaaccatttttttcattaagtcaactaataattcatcattgaaattagccattaattcttcgttaacaacatttccgtcgttatccagaatttgtacgggttttgcataaggtaccccttcattggctttaatctcagcaaaattgacagctttggtattggccatattcaacattcctttccaaatccaattaacatcatgtaagcgattgcttacctacatttatagtataaccgattgcctaaataatacaagcgctttcataaacttaatggacagaattgttaaaatggtccaagtgaagtatacgttttttcaaaatttatagttaaatattgttatcctcatattcattagcaattttaaatagttatgatagactataatatgactgaatttttatatggaggcatagtgagtaatgtatttaatgaaagatattacccgtgatggcaatcccgttttacgtaaacgagctgctaaggtctcatttcccctatctgatgaagaccaaaaattagcaaaggatatgatgcaatacttagaagtaagccaagatcctgaattatgtgaaaagtacaagttacgagctggagttggccttgccgctcctcaagttggtgtttcaaagcaaatggctgctgtccttgttcccgcacctgctgaaggtgaaaagcccttatttaaggacgttatcattaatccagtaatcgttagtgaatcggttcaatatggtgctcttactgaaggcgaaggttgtctttcagttgataaagacgtgcctggctacgtaccacgacatgaccgcatcacattacgttatcaagacgttaacggtgaaactcataaggtacgattaaagcattatccagcaattgtttgtcagcatgaaattgaccatttgcatggggtgctattttacgatcatattaataaagatcaaccatttgaggcgcctgcagatacagtaatgattagttaatttttacaaaaaatggtcgagagaaaaatacactttctcccggccattttcactaattactattttgatttaatttttttaaatcttcaatgtactcaacagttgcttcatttatcaaataggcaatatcgatatgcaaaatcccctcatatttccaccaatcggttataataaacggttgagaggctttgggagccatctttaaatggtgtcgttttgcatattcattaagttctgctgctagtttttgacgtgtgaaatcatcaagattaatattttcttttttataatcaaaatggtattcaaaagcaagcacaccttttccccaaacatcggcaacaatttgagaatttagatttttattccaatgtaacatttctttcaaactagtatttaacgctgcatcagtaacgtcttgagcgtttttctgtaccatcatcgttgctcgcttaagaaatacgcgatggatcgttaaataaagagcaataacaattattgctgctaaaatacagattaagaatataaccatgactatcacctcgttggcctttacctttatttaataataccatgttaggaaaatttaagacacttttggttatctgtgatagaataataaagtaaattactgcataatatctttaattaaggagtttttaacagtatgacttttaaagtatactaccaagctgataagacaaaacgcccagttcgtgaaaacactcaatcattgtatattgaagctgattcagaagctgaagcacttttaatggttgaacacaacactgactacaatattgaatttgtagaacaacttgatgaaaaggcccttgcttacgaaaagcaaaaccctaactttaagttgacgacgttctaagcttttaatcattaacagaggctgagaaaaacgcttgtttttctcagcctccaactttcttatgaacattagaaaaatactgaattaattattcgaatataaatattattttgctttttggcaccattcaaaggaggaatattgatgaattattcaatcatcctcaaccgtcatgctggtaatggtaatgcagaaaaggcatggtcgtcaattaaaccggtcttagatcaacaacaaattgattatcacatggaaacaactaagtatcctaatcatggagaataccttgccagccaaatcgcccaatctcataatgcgggatcaacaattgtcattgcgattggtggtgatggtacgctacatcaagttgttaatggacttatgaagacggccaagcgattgaataaaaaaccacttgcggttggatatattcctgctgggacaggaaatgattttgcccgcggttacgggatttctatgcatccacaaagggcattaaatcaaattttaactgcagacgcaccacaaaaaattaacattggtcattatcatgaggcgattcggggtgaagaaggttattttcttaataatttagggattggttttgacgcggcaattgttagtcgtgctaatacgtttaaggctcgtcacaagaaaaatcatattgggcgtttcacctacctccaaaaggcaattggagtaatctatgatcaagagccctttaccctgatgattcaatctgggcgtgaacgctttatttttcctaaagcttacatcgcaattaccagcaaccatccatttatcggtggtggatttaaagttgccccaagtgcttcgttaaagaaaccatcattggaattagtcgtcgctgaacggaaaggatggcctatgacaatatggcaattgctgcaattagcccgaggcaatttagatcaatcaaaatttgcccaccacttccaaagcgataatctccacatcacaactacttcactagaatttagtcaaactgacggagaagaaataggtaatcgttttatcgacctcaccctagacattagtcaatatccaatttggcaaacaacagaaaaataagttaaaagcagtaagtccagaagataattttttcttctagcgcttactgctttttgttaatcttttttagtttattaatcttcagaagcttccattgcttctaaaataatccgtaactgactgcattcttcccgtaaagattgcatctcttcaccgtattttggttgaatagtaacagtctgagtgcccgtattttcctgtccctcttgtttacataaatcatccaaacgggactgtgcacggtataaatcttcttcaatttcatgtttgttactcatatttaacactccccaataaatgtgaaatatttttagagcaatactggaattgcaatataagtaagataacacgaggatagaagaatgttaaccctttttaggttacatctttgttactatctaatgaaaaagctctaataatctatcagaactatttaaccgttccggcaaaacttggattaaagtatggactgattgtgtaagtcgaaacattagtccctgggtgagcagcggccacatattgattatttcctgtgtaaatagctgtatggtaagttgaaccatggttaccccagaataagagatcgcctggcttagcttcactaactggatgttggtccacacagttttcaagtgctcctgtatagtgtggtaattgcttaccttccgcattagcataaacatacttaactaatccagaacaatccattccactaagactttcaccaccccatacgtatggaacactattagagttagcaatcttagtggcaagactaactacagaaccatgttgtaaatcttgattagtagttgctgcttgctgtgcaggttgactagcagccgcttgtgattgttgcggttgagcttgtgacgttacaacagttgtttgttgcgaagcagcattactattctgaacgttatccgtcgcttgtgatgctggtgcagtctgtgattgtgaagcttgacttgctactggtgctgcttgaacaaatgattgtccatataaagcagcagtattcacagctgttgaagtagcttgactaacagcaaaactttgtgtttgcggtgcaacactattttcagctgaggcagaagcaacctgaacattattagctgtagcaggttgagcagcaactgttgtaatggctggactattagtagttgctgaggacgttacagcagcagaagtcgaagttgtactattcgcaatagtggtactactattgttggctgcactttggttaggagcagctactgttgaagaagttgaaacttgttgcgttgcactcaaagcaggagttgcttgtgaagttcctgctggttggctactagccacatcttgttgaggcacagaagcagaggcaactgctgaagtttgaacctggatcaatgaagttgtgtccgtcgattgagcagccggttgctgagccgatacactcgcatcagcaacaggggtacttacaacgggcgcgtttacagcagttgagatcgcaggacctgttacactgagttgttgtccaatgtataatgaatcattagagcttaagttattccatgacattaattgactaacagttacattataacgatctgcaatagagctaagcgtgtcgccaggcttaacagtataactaccatcagtattcaaatccgcgttagcatcatgttgagtagtaggcaacgttaattgttgaccaactgtaattaagtcgatgctatcacttatcttcttaactgaaggatttgtttgttctaatgcactaatagaaagtccatgttgttttgcaagcccccaaatagtgtcaccagacttaacagtaagctgttcagcattaactgcttgtgttgtcactgctaataaacttaaggcactaactgctcctgcaaaaacgccacgagatcgatggttatttgaatgatgtgttctttttttactcatataaataaaacaccctcccaataagttcctaaaaactaaacaaacaataataaattagtgaaatacacaattctaactttaccattaatttttaaatgcgtatagcaattattagatagttcttaaaaaacgttactctttcttaaaagattaatcattataataatatttaatctatcatttcattttttacacgatccatacgagttactaataacaattcaataattgtaataatactcattaatagaactgagtaacgactagtcgtcatgaaaacaataattgctagtatacacaagatccaattcaaccgtttttcttgacgaactacccgaataaaatcctttgtaactttatctggtcgttgacttgccaagaatccaagttgactatgtaaacgattttcccaaatcactaatcctaaaaaggcaattgaaataataaacgttattagactattcatcattatcctcgctatcatcggcatgcaccgtcttattatttgcttgtgattcattgtatcgagcggataaaatctgctgatatttttccatgattactttattgatcggtgtatcatttagggttggatatttttcttttattttttccaaaacatcatctgaaaagtcataaacagtcttaacttccttttcaccattaagaaatgccaacgtctcatcatagtccagagttattaaatcgcgctgtgtacggtcagcatctggctggtggaggacatctggatcatcttttaaatcttcacgaaagccgttttcatcatattgatatttattatcttccatttttaaattctccttggttatcttccaattcattatacggtctttataagactaagccaagccagtaatttgctgtaaaatgtgcgtagaaaacagtcttctcgacaaggcggttggctaagctaaggcggaggtatgggctaattgtcgctcggacgcgagccttgtgacaacgcgaagctaattctacgttatcttgcaattgttcgtgaaaatagcagagggtgagaaaaaagcaaagttttttccaccctcttttaattcctaattattaacatgactcactttaattaaacgcgcaacgttttctgctgtttgcgcaatatcaataggtgcatctgctaatgctgcttttaatggtttagccccttcaggagttgcaaaaattgcatcgatggccgtggatgaatatagatcatttacacctttaccaatatttccagccaacacaattactggagcattaggagccacctctttagttgccttagcgactccatatggcgttttaccaaatttagtctggaaatcaattcctccttcaccagtaaaaacataatcagcgccaactgcctttttttgtagttgagttgcttcaatcactaattctactcctcgcttcattgtcgcaccggtaaatgctattaatccggctcctaaaccaccggctgcccctgcacctgccgtttgttcaacgtctggcccaccagctgcaactatttttcgtgcataatgatgaagatttttgtccaagatgttcaccatttcgtcatcagctcctttttgcgggccaaatactggggcggccccattttttcctgttaatgggttggtaacgtctgatgcaatctgaatatctacattttttaagcgaggatctaagtctccaaaatctatttgctctaaacttgctaactcaccaccgcctaaaccaatttcatgattatcagcatccagtaaacgtgctccaagtgcttgggccattcccgccccgccatcaacggttgcacttccaccaattccaataattattttttttatgttatggtcaagagcatccttaattaactcgccggtaccatatgtagttgtaataagcgggttcgcagtctccttattaacaaattgaaggccacttgccgctgccatttcaatcactgctgtttccccatcacctaatattccgtactcagcattaactaatttatttaatgggttgtggactttagcaatcatttttcgaccgttagtcgcatcaactaaggattgaacagttccttctcctccatcagccattggaactaaaacatactcggcattcggaaacactcttttaattccttctgccatcacatttgctgcttcttttgctgttagtccgcctttaaatgaatctggagcaattacaaatttcatcactgatcatcctttcatttatagtaaatgcaaaaagccatacaagatagttgcggttaacattgcggaacctccaactaagaattcataaaaaataccttgcgatcgttctttaatatccatatgcattgcattcgctgtaacatggaaatagtttccttgaggtaattggtcaatgacaatcgccccagtatgaaccattgcagccgctgcaagtggtgcaacaccaaatcctaaaatagacttggcaaaagaaccagtagctaaaataacacccgtagaggttgaagcagttgctccggccatgagaataccagaaagtggtgctaataagacaccaggcacatgacttgccttaataagttcgattaataactctgggaaagtagacgcagtaatagtagcaccaattgcacctgcaccaattaaaatcattactacgccagtcattcgactaacaccggtctgagcataactcttaattttttcaccttttcccattgctagagcacctattattgctgcaaatggcaaaacataggtagcatctaaatttacttttgctaataatggtaaatgacaaatagttccaattggtcctaataaaagtaaaactattgcaataacaggagcaacgatggcttgtttaaatgtcggcaaatcactttgcttgattgtttttgcactatcttcaagatcttgttctagaactgccctaccttttttgcggatcattctagctacaacaactgtaactattaaagcgatgacggcaggaataaaatcagcaatcattacttgacttagttcaagcccaaaaccctttgctgctgcaattgtatttgcatttggtgagattatgttacctgccttgcctccaccagataaggcaaccaataaagataattttgaaatatgcatattgcgaccaacttcaagggcaattggtgcaacaattaaaacagcgactgggataaagacacccacagctgtaattaccatcgttgctagagctaatgcaaaaatagctaaccgatcaccaaatttattaacgattgtccgtgcaagggtttcggcagccccagaatccatcataacaccagctaacattcctgctgctaatactcgaaggaccgttcccattacactttgttcacctttaaccaaaatattaatagttccttctaaaccagccccaccaataacggcgccgactattgcacctagtaataatgaatatactggatctaattttcgtaaaattaaaaaaatcgcaagtgctaatcctattaatgctccccaccaagaaatcattttataagcctcctctttgattgctagtaaagaaatattaaaataagataaaatatcacaagaaacagtatccctttgtcatcgtttacattaatccttaaacaagcttataacaagttatgttttgcacaaagattattatgcattttgtacacaaatcctattatcaaaatcttatcgtctaattaccaatcagtaaggagaaaataatggaactcaaaccagaacttgcacaatcaattgtcgatcatatgatgacgcaaataccgtataacattaatattatgaataagaaaggttatattattgcaagtggaaataaaagcaggataaatactttacatgttggagctgttgatgcgataaaacagcgaaaaacactaccaatggagcaacaatatggaaatcatggacagccaggcgttaatatgcccttaaaatttaaaaatgaaattattggtgttgttggaattactggtgaccctaataaagttactcccctagcatcattgctaaaaacagcagtcgagctcttgctacagcaaaaacaagaaaatgaacaagagcacgaaattgaaaaagttaaacaaagatttatttataggtggattaatgtcagcaagtatcaaaatccgcaacttgatagtgaactagttgaggaagcaaatcgtctaaatataaatctagcaaaacaacgacttgtaattgcaattgctgggagttctcagataatcaaaaaccttaaactagatcaggaaacaattattttttctcttactaatcacattgagttgattatcctcagttcaaagcaccaagaaacatatattcaacaaaaacttgaacatcaagaaattgaatacggtatcagtaattggggtaatttgcttggtagattagcggagcaagcagttacaacactgcgattaagtaatatttttggaaagccatcatttaggcattactcacaagtctcttttattaaacaggtattagatagtgatttaaatttaatagcagttaatgatcaatatgaagctttactaaaaagaaaagatgggaaagaattgatcgatacaatccgtgagttcattaagtgtaatatgagtgtaaatcaaactgcgcataatttatttgtacaccgtaatacacttaataaccgattacttcgcattaaaaaactttttgaactagatcctaaaaatactgaagacttatttcaactttttattggctacattactttttactatcgacaaactttataaccatacaaaaaatactccctatattcagagagtattttttattatgattataaaattttaaactaacccatttgcgactaaacgttctgcattttcaacggtattccaagccgcccctttaaggagattatcagcaacaacccacatattaaaggaaccaggattttcttcatctgcacggagacgaccaacaaaagtgtcacgcttgccaacagcattaattggttgaggataaacctggtgcgcaggatcatcctgcagaactaccccgggagcgtcctttaatactgcccgcaattggtcaacagttaccgttggatcatcaacagtaaagtaaatcgattctccatgagcaattgggacaggtacacgaacacaagtggcagtaaccttaatatccttagcgtccatgtcgtttaacatgatcttctttgtttcgtggatcatcttccattcttcatgggagtaaccatcatcttcaaagacatcgatctggggtaataaattaaaagctaatggataatgcttcttgtcaccctttgttggcaaaatcttggcatctgcttgcatatctttaccatcaaggtagtcttgagtttcttgtcgtaattcatttaaggctgattggcctgctcctgaagctgcttggtaagtcgaaacaataatttgatttaatccaaatgcttggcggattggttccaatgctaccaccatttgaattgtcgaacagttagggttagcaatgattccgtgatgattttttaacgcctcttcatttacttctggaactactagcggtacatcaggttccattcgaaaagcactcgtattatcaacacaaactgctccccgttttactgcttctggaaggaacttttttgatactgatccaccagcagatgaaagcacaatatcaaccccattaaaagaatcaggtgtcgtttcttcaacagtgatcggttggcctttaaatgataattgtttaccagctgacttagcagatgccagtaatttcacactctttactggaattgttgattgttccaattgctgaatcatccgtgtaccaactgcaccagtagcacccaaaattgcgacattatattctttactcatcttagttccttctttcaacctatcctaaattattcataaaattttgtaaccgttcaatcgccgtatcaataacagaatctgccgctgcatatgataagcgaatgtatccttctccaccaggaccaaatgcatttccaggaattacgccaactttagcttcgtgggctagtttacgagcaaaagcgagatcatccttcccaaattgcgcagggattttagcaaaaatataaaatgcgccatctggcaacgcaatttcaaagcccatctttctcattgcactcgcaagtttatctctccgttgacgataggcccgcttaaattcttgcggatcatcattcccgttttctaacgcttcaatcgcggccgcttgagcagtatcatttgggcacgttaccataaatgaatgcatctttgacatcgttgaaataaattctcctgggccagccacatatcctaaacgataacccgtcattgcatgtgattttgataaaccactaatcagaattgtctgctcgggcaaaagtgtcgcaagtgaatggaagggttgatcgtacatcaatgaactataaatctcatcaacaatcgcatagatatgatgatcttcaattactttagccaatgcttttaactcttcttcagtgtacgaacggccagttggattattaggataatttaggagaacagcctttactgccggaccctcttttgctaatacctcttctagtctttcagcggataacaagaagccatcttcagcagtgttaactttgatcggttcagcaccagttagagaaacactcgggaaatatagcgaaaatgctggagtgggaataattactttatctcccggatttaacattgcaaaagttgtcgcggttaccgcttctgttgccccaatcgttactacaatttcggtttcagggtcatagtaaacgtgacgactctgctcaagatatttactaatcgctttgcgtaattcaatcttacccttgctcgacgaatagtgagaatcatcattttgaatactttcaattgctgccttcttaacatgatctggcacagcaaagtccggttccccaagcgttaattttactagtccaggaacggcagaaatttcttcatcaaatgcgcgaatctgtgctggcggaacagctgccagatgactatttacggttgttgctaattcagcatggagtcttggcattttttcaccctcttataaaatattttctaagccaattaccaattttgataatccatcaactttctccagagcaaccttaaccccattcataaaggattgacggtcaaatgagtcttggcggatagttagggcctcgccatccccaccaaagagaacttgttcgtgagcaatgtaccccggaagtcgaacagcatgaatcttaattccatggtagtcgccaccccgcgcaccggttaagctctctgtctcatcaggattcgtctcatgtgcaggacggacttgatcgatcaactttgcggtactcaaagccgttcccgatggggcatcttttttatcaccatgatgcatttcaataatttcaacgtccgggaaatatttagctgcttcctgagcaaatttcataagaagaactgccgacatcccaaaattagcagcgatcaatccacccacttgtttttcttcactgaggcgcaccaggtctgcttgttgttcatcggttaagccggtcgttccaacaatcggcctcattccgtgttcaagcgcaaacttaacattctgataaacagcacttggcaaggtgaaatcaatccaaatatcagcaacgccatcttcaatttcatccaaagtttgataaggatgaacagatgatgcaaggtgaaaatcagccatattctcttttgttaaggttggtgcaagcgcagcagtaatttcaaacccagcgagtgagttcactagatcaaccgccttttgtcccattgctccagtcgcaccagcaattaaaacttttttcatgctttattcccccaaatttaaaggtaagttcttggcagtcaacgaattagtaggtaatgataaggcagtctctaattcgcgtttttcttcttcatttaatggaagaattggtaagcgacaactaccaacgttaaaaccttgcgcattcaaaacagctttaactggtgatggtgatgggaacataaacaaagcggccatccggggagttaaccaccgttgcaacttaccagcagtttgataatcgcctcggtatagtgagtcatacatttggcgcatttgatcgacataggtatgggaagcaaccgagataaccccatttgctcctaaaacccgggcagttagcgcctgtgcatcttcacccgtgaaaactgcaaaatcagggtcgcggtgttcaacaatgtattcaagttcttccaaagatgtacattgttttacagcggcgatattttgatggtgcgacaattctactacggtttcctgagccatctttacccctgtacgaccaggaatgttgtaaatgatgattgggaggtcaacattatccgcaactgctgtgaaatgagcaaccattccccgttggttaggtttgttataaggaggaacaacaacaagggcataatcgataccgttaatttgcgcaacctcattagtaaaggcaatcgtttccttagtattattgctaccagttccagcaataaccggaacccgtccgtttacaatttcaccgaaatgttggtatagctcaattttttcatcatgagtgagttctggagtttccccagtagtcccccgataacaaaaccattactcccatgttcaattaagtaatttgtcaaatattctaaacgaccatagtcaatatttccctcatcatcaaaaggggttacaattgccgtcattaagtctgcattttgtaataatgtcatattatttcctccattatttgttccctattaattttgcatccgatattcaagaaaaccagtaatcgcatctactccacgtttaattgctttttcattgggggtaagggtggccgaatgtaattgtgaatcatcttcaaccccaagccaaaacatggttcccggaaatttagccagtaagtagccaaagtcttccccagtcattgctggttctgtttcgataaagtttacagttggtgtttcttccatataatggataaaccgttttgttaattctggattattttctactggccaatagccaccctgatttaattcaagggaaacatccatgttaaaactacgcccgattccttcacatacgtccttcaagcggtcatcaatagtttcaatcatcgtctgcgttagtccccgaatcgttccttcaatccgtgtatgtccagcgataacatttcgaatcgtcccgccgtcaatctttcctaaagtaattacaccactttgaataggatcgatactccgcgaaatcacagtctgcacttgaagaattaatgaggctgccgcaacgaccgtatcattagcattttgaggatacgccgcgtgaccgcccttaccattgaggtcaatattaacttccgtggttcccgcaaacaaggtccccatccgacaaccaattgctcctgctggcaaatcaggattatcatgcaaaccgtaaaactcatctggtttccactttccgctaaacaagcccagttcatatgcccgctttccaccattttcgctttcttcggccggttggaagaaaaacaggatattatcttgcggctggtgttcactaaaataattcaatacccctaatgcaaccgtcatatgaatatcatgaccacaggcgtgcattattcccggatgagttgatgaatatggcaagcctgtttgttcctcaactggtaaagcatcaatgtctgttcgatatccaattgttcgttgtggattctgaccatgaactaacaccatgagagcagttggcaattccttaaaagtacgaacttctaaaaatgcttggttaaaactagcaaccgtctccactaagtattggtgggtgtcaaattcatggagagctagttccggaatttggtggagatgacgacgaatttgaattaattcttcttctgttaacatcttcatcctcctaaagcttccgtaaatcgtcctctaattcagtcttaccagcagtttggtcatcaacattcttaataaacttagcaggaactcccgcaaccatcgtatgaggagcaacatcatgagtaaccacggcgccagcagcaatgaccgctccttctcctacatgaaccccttcaattaccaccgcattggcgccaatcattacattgtcatcaatgcggactggttcagctgaagccggttcaaccactccagctaatacagtaccagcaccaatatgacagtggcgaccaacaattgcacggccaccaagaactgcccccatatcaatcatcgaatcggcaccaatttcagcaccaatattaattgttgcgcccatcataatgacagcattgtcaccaataagcactttatcgcgaataattgctcctggctcaatgcgggcattaatatccttcaaatcaagcaaagggactgctgaattacgcgcatcgttttccacatggtaagattcaattgctgaactgtattcctttaataacggttcaataactgtccaatcaccgaaaataacacccgtacgctgttcaagaaatgtttctacttctgtgggaaattctaaatcacccaaattccctttaagatagacctttaccggtgtcttcttgggtgcgttactaatgtagttaatgattgtttgtgcatctaattcagccataattatttacctctttcttcctttatatatgtcaaattattgttggtatggttcatccaaatgaattaaatcatcataggtttctcgtttaattacaacctgagctgtgcctttttctgcaaagacaactgctggacgaggattccgattataatttgaagccattgaataaccataagcaccagtatcaagcatcgctaagacatctcctggttttgtagccggtaatacctgattctgactgaggatatcaccagactcgcaatactttcctgctacccgaacatgttcaaccaactctgcacgaggattatttgctaagaccgtttcatattgtgcttcataaagtgctggacgaatgttatcacccatcccccatcaactgttacatatggcttcaaccctggtacatctttacgtgatccaacagtataaagattataaccagcgggccccgcgattgaacgtccgggttctatccagatcgctggcatagcaagatttgtttctttaatttcagctttaattaccttaataattgctgccacaaattcttctggagcaagtggtgtatcatcttttacataacgaattccaaaaccgcccccaacattgatcacagcagcttgatagttaaatttttcttgccagtgggcagcaacttcaaccaacttcttagctaccccttcaaatcccgcaagctcaaaaatctgtgaaccaatatgggcatgcaaccctttcatttgcatccggggattctcgaggacttttgctaacgcctcatctgcctgtcctgattgaaggtcaaacccaaacttactgtcaacctgaccagtttgaatgtacttatttgtatgagcagaaattccaggagtaattcgcaacattacatcaacatgtgcatcaagcttctccaaaacgtctgctagcaattcaatctcatggaagttatcaatcatgattgttcccacgtgatggtcaattgccatttccaattcttcccgtgatttattgtttccgtgaaaactaacatcagccattggaaagccggctttgattgccgtatataattcaccaccagaaacaacatcaacatgcgcaccttctgcagcaactacttgatacattgcgattgctgaaaaagctttactagcatagctaaccgcataatcaacattattttcttcaaaaacccgcttaaatgctcgaatctgttggcgaatctgttgaacatcataaacaactaacggggtaccaaaccgatgagctaagtcaaccgcatcacatcccccaatcgttagatgaccagcggcatttaattgttgatcagtaatctgttcgttcatttgtaattcctccatgagatttgtagtaaagaggctataaaaaatccactgtctgcgcaaacaaacagtggaattcacttatccattctgatttgtcgatagcgcaacgcaggctcttattgtcctgcgacagtccgtagcttattcaactacgacccagctacttaatgtgccaaactaagcgcttcggcaacttccctgttcaactaacctcaatgtcttggcggactaaattagtttactagtgtcggttgcgcctcttcgatttatacatagcttataagtcttttatgagaatgtcaatacaaataattaaatttaaaaagtttttttaatccattagatgtaagaaagtttattttacttaccttatacaacttaaaggtttgcatgtcttccttaatgtgttagaattcgattaaattattttagagataaattaacaaccctaattttctcaaaggagtatttaagtatgaaagttgtaaaatttggtggaagttctctggctaatggagaagcctttcaaaatgcaattaatattattacctctgacccccaacgccgggtaattgtcacttctgcgccgggtaaacgttttgccgatgatattaaagttactgacttactgattaaatatgcccaagcagtaattgcaggccaaaatccccaagaaatcgttgaacaaattttaaatcgatatcaagagattgccgcttattttggcttaccagcagataaattaattccgctagttgaacgactggaaggtcttcctaaccatacgtatccaaatgataactatctcttggccgctttcaaagctcatggtgaacgcttaaacgctcaactaatggctatccttttgcagcatttaggctatgaagcacgttttgtgacaccaagtgaagctggtattatcgttactggaacacccaataatgctaacgttattccagaaacatatgcaaacttgagtcattttacgtttaatgagaacgaattattagtattccctggtttctatggcctaactcttgctggacacattgctactttttcccgtggtggttctgatatcaccggtgcaattctcgcgcgcggtcttcacgcttcaacttatgaaaatttcaccgatgtcgatgctatttactcagccaatccacaaattgtcgaccatccgcaaccaattacaaccatgacttaccgggaaatgcgagaactatcttatgctggtttctccgtctttcacgatgaagcattgattcctgctattcaaggaaatattccaattaatgttcgtaatactaatgatcctgaaaagccgggaacaatgattgtccctgataaagattttcaaccaagcgatattataacgggggtcgtgagtggaaaacactttgcagccctctacctgcacaaatatcttcttaacaagcaagcaggttttactcttcggatccttgaaattctcgcaaagcacaacgtctcatacgaacatatgccttccggaatcgatgatataacaattatccttgatcggaatgcaattaatgaccaattaatcgataccatctgcaatgaaattcaagaggagattaatcctgaccgtttagaatggattgataattatgcaattaccatggttgttggtgaaggtatgcgtaatcgcacgggggtaattgatgatatattaatgcctctagccgaaaaacacattgcggttcccatgattaatcaaggagcttcacgaattgcaattatgatcggaacatacaacgaagacgcggatgatgccgttcgagctatttaccatcgctttttcgcaaattaggaggaactatttatggtgcaattattaaaagtacacggatcacaaaatgccttttttattcttgaccaaacacaattgactactccccttaccgataaagaactagtttcatttacccgaaaagtaactgatacacaaaatggcgttctcggtggtgctgatggcgttttagttgttaaccatccaactagaccaggatcggtagcacaaatgcgggtaattaacgcagatggcagcgaagcctcaatgtgcggtaatggtttgagaacggttgctcgttatgtagcagaacgtgataatttaaccgattttaaagttgatacaatgaatgctagtcttcgtgttcgtcagcatgaagaccttgcacctggagttcctgcttttgcggttgaaatttcaccagtaaagtttgaccgcactgctttgccatttgataatcttggccatgagcgcctgttagacaccctcgtccctgagttatatcctaacctccgtttttcagcccttgctgttcctaacccccacttaattagttttgttagtatggaagagctaaatggcccagcacttgaagaattaggtacacggttaaatagtgataatctttacttcagtgacggggtaaatgttaattttggccatattctcggtcataacaaactctttgtaaaaacgtttgaacgaggagtcggctttacaaatgcttgtgggacaggtatgtctgccactagtctcgctttagccctcactcatccagacgcagcatcatttaatgaaccaattagtgtttataatcctggtggcatggttaagacaattcttcaccgtgatgactacaactactgggtcgaactaatcggtaatgctacgtttactcatattattactgtagaggagtcaacaattcaccaagaaaatcttgatgagcttcaaagcagtagcgttgaaatggatgaaaacaaagcatatttggcttttgttaattcactaccttccttaaaatttgaaaactaaaaaaatttaaaagataaaaatcgatgaaaattcagtttcaactctgaattttcatcgatttttaatttatttacgattaaacaatgtatcaattgattggttattgtggatacgaacaattgcttcttttaataaatcgtccactgataattgaaccaacttagggaattctttctcttttggtagatggattgtatctgttacaatcattttttcaagaggagaattttgtaacgtatttaccgcatcagctgataatactgcatgcgtagcaattccgtaaactttagcggcaccaaagttctttaatgcttgtgcagataagttcatccgtactcctgtatctacaatatcatcaacaataatcgcagtctttccttttacatccccgattacatattccggtacttcttgttcagtccgttcccgaacttcattgttacggttatcaataatcgcaatggaagctttaattcgttcagcatatttccgcgctaaattaacgccagcatgatcaggggcaactactacaatatcatcacccaagttttgttcctcaatatatttagtaaaaagactggttgcttgaagatgatcaacaggaatatcaaagaaaccttgaacttgaggagcatgaaggtcaatcgttactagtcgactaatttgatccatttcaagaaggttggcgatcaatttagctgtaattggttcacggcttcgtgcttttcgatcttgacgtgcatagccatagtatggcattactacgttaatcttggccgcacttgcccgccgtagagcatcaaccataattaatagttccatcaagttagtgttaactggatcagaaactgactggatgacgtagacctcacagccacgaatactttcgtcaattgtaattttaatttccccatcagcaaaatgactaatggaagctttactcaacggaatccccacgcgttgagcaatttgttcagctagttttggatttgaatttagtgaaaataaacgcacattatcggcattttttatctgggtcatttttatactcctttaaagttcgacaataatcataactattatgacaacaaattactattcaagcaagtattatttggcttgatgcaaactttgtaagctaatattttccattccgattaatggatcaattgtctctgaattaatgagatcagctgttaggatatattgctgagcatcattatttattaactgttcattttctttttgaacaggttgcggactagaaagttctttggttaacgaatccgtttgatgatccaattttgattttagttcaccatgcttactccaaaccttatcaagacgatcgaccaaagaagttttccggttaactgcttcattttttacactagtcacaaccgcatacggctcaccgatcaagactaacttttctgcggcacgggtaatcgccgtatataaaagatttcgttgaagcatccggctaaactgctgaacaatcggcaaaagaaccatcttaaactgacttccctgtgctttatggatcgaaatacaataagctaaccgtaattgattccattccatgcggctatagctcacttcattaccatcaaaatcgacagtaattgattcatttttcttaccgactgtcctaccgctttcaattgctgtgatttttccaatatcaccattaaaaatgttcttttctggaacattaacgagttgcagaaccttatctccaacacgaaaagttagtcccctaaaatcgacttcttgctttccattagctggaggattatatgcctgttgtgcaagttcattcaaacggtcgattcccgcctgtccgcggtacattggtgccaagatttgaatatcatttgcggaataatctcgttttttagaaaggtcaataatttgttgaaccacacttggcacttggttagcatggcatgagataaatgatcgatctggcattttattcgttagatctgatggtaacttaccctctttgatagcatgagctaatgggataattgttgaatcagcagcctggcggtgaatattggttagttcaactttgggcagttctgcaaagtcaagaagatcatggaaaatttgcccgggaccaacagatggtaattggtctttatcacctaccaaaaccacatgcatagaagtagggacggcttgaataagagtcttaaacaagagggtatcgaccatcgacatttcatcaataatcaataacgagccttctaaatcgcgggcattcatatcagttggcatttcccgaccgttaagtcctagcaagcgatggattgtacttgctggcaaatctgtagcttcactcattcgtttagcagctcggcctgtaggagcagctagcaaaacaggaaaagacttttccttatattcatttacatccaatgagagattatgaattttcgcatagctagctacaattcccttaataattgttgtttttcccgttcctgggcctcccgtaagaagcatgactttgctgtttaaggctgttttaatagcctctttttgaacttggtcataggttatccccgattgatcagcaacttccgtaactgttttttcaatagtcgttgctggtaatttttcctggtcaacggtaagaagacgatgtaagtgatcagcaatttgccattccgcgttataaagggcagttggataaattttttcatccgcgtaactaatttcttgatttttctctaactcaacaatttggttggcaattaaatctgtagaaacacggccaccacttccttgggcaagcaattggatagtttgctgcagaagaggttttgttgtagtaaatgtatcaccagtttccattgtcaagtcatcaagtgtctggataattgctgcatcaatccggcgtgaatcatccgtggcaattcctaatttttgtgccacctgatcagcacgattaaaactaattccatctatttcagcggcgagttgataggggttttcattaataatatgtagagtttcttccccgtacttgtcaaaaattgcactactaaggttagcgccaaagccgagatcatttaggccgataataatctcgtccatcccctggtttgcccgtaaattatcaaccaatgaatccttaactgctttgcggagttttaatttatctaaaacatgcgggtcagcaataattttattaatcgcatctgttcctaacttgtcgacaattttttcagccgtcttttttccaattccggtaaattgttttccagacaagaaatcaactaacccatccttgcttgtaggacggttgacatgataagaagtagcttgaaattgttgtccatatcgtggatgctcaacaatttttccctcaaagcggtaagtctgatcatcactaagatcaccaaaacttccggttacagtaatttccggctcgtgccaatcaaaatttgcttcttcaaccgagacaattaaaactttaaaaaacgaatctggactagtaaaaatctcagattgtacctgaccaataaaaaaagacggctccgttggcgtcttaaataggtcgatttcttcagccatagaagtcatcctttcatgttgctaatttttcttttgcgttgcctgaagcgctttttcaatatcattaagtcgttgctcactcttatggtagtagttaggatctaactgcttagcttgcgcaaggtagtctttgtatggttcaccaagaaccatcgctacaattccgcggttaaattgcgtatcagcacggcccggatgatactttagaattgcatcataataagccttagcctgtttaaattcacctaatgctaataatgaatcaccaattacctgattaatttcaggatcgtctggacgtaattcaagggcagttaatccataagcaacggcttgcttgtattgtccctttttcatatagctttgggctaacataagataagaatcagctttgagtttgggatcatcaatcttattgtaaagcttaattgcttcattaactttgccaatctcatagtaaaggttaccaagaccatagtttaagaggttcatagcatccttgtcaccctttgcctcaaagatccccaaagccttcataaagagttcttctgcttgttgatagtcatttaaccgggttagcaaagaacctaaatcataataattgtttactttatctgggtgctcatcaattgcttcaactagtttatgaactaatttttctgtttcctttttcttaggatcacgaaaaccttttttctctgtcattaatatcacctcttaaatcgtatcagtcggatcaaccttgctcttgtgaaggtaagatgtatcattccacttttcaagttcaaaatgacgaccatcattagtaataagaatcgtcgttgatgtattgcttagtccaccacgatctttcaagtgagcaagcggtgttccaatcaatgcattaatggcagcattcaaggcagctccatgtgaaatcacgagaatattaccattaggatactggcgacaatactcttcaattgctgcacggaaacgagcgattacttctagaaaactttctccttctactaatgattcatcatatttatcaggatgatgacgaaagttttttaagacttcaggccattttgccgcaacatcttcaaaatgcattccctccattttgcctaaattaaattcttttaaccggctatcaattgttaatgggatttctggattcaaatggttcaataatgcctgagctgttacgcgcgcacgctttaaaggactagtataagcgtgttcaaacggaatcctttgtaaagaacttgctaataattcaatttcacgataactatcctttaataacggtgaatcgccattggcaccttgataacgggattctaaattccattgcgtttttccgtgccggattaaataaacttttgtcatctctgtcgttaccccttttatttactatcttaccagagtttgcggcaattgtttatcacagagttattactttatgtatatttaagaaggcaaaagcgaaattacctctgccttctttaaggtctaaaaatatgaatcaaacgtattgaagctgccggtcatgactgtaagcacgatcaataatcgcgctcccaaggcattcctctccatcgtaaaagacaaccgcttgacctggagtgatggcccgtgcaggatcatcaaattcaactgttaccatttgatcatcctctgacaaatgaacagtaacgccaacatctgtctgacggtaacggaacttggccgtacaatgaaaatcacgcccataacgacttacaacatcatcaacccagtggatatcactcgcttcaagatgagtagcataaagatagctgttttcgtatccttgaccaacataaagaacgttcttcttcatatccttaccgattacaaaccatggctcattactttccttattaccaccaaggccaagcccacgacgctgaccaatggtgtaatacattaagcccatatgctgaccaacgaccttaccatcaagggtctccatattccctggttgtgctggaatatattgactcaagaattcacgaaaatgaccatcctcaccgataaagcaaattccaacagaatccttcttatcagcagtagcaagccctgcttcttcagcaatctttctgatttctggcttagtgtagccagctaatggaaacattaccttatccaactgcttataatcaagttgacttaagaagtaagtttgatccttgtgttggtctttagcacgcatcaagtgcatccggccgttctcatcacgctttacatcagcatagtgtccagtagcaacgtaatcagcacctaattggttagcatattcaataaaagccttgaacttgatctctttattacaaataacatcaggatttggtgtacgacctttcttgtactcagcaatgaaatacttgaaaacccgatcccagtattccttctcaaagttaacagaatagtatggaatcccaatcttagaagcaacttttgctacatctttgtagtcttcagtggcagtacaaacaccattttcatcagtgtcatcccagtttttcatgaagacaccaacaacatcgtatccttgaagtttcaagagaagagccgtcactgaagagtcgactcctccactcattcctaccaccacacgtgtatgactattatcagccattaattatcaccatcatttcgtatagattctggaataatctacgattgaaggtcgcatgcatccagtgataaccattgtaccagagtatttcaatccctgcacagtttttatttagtgaatatttgccgggcaaccatttcatctaaaatatagtgatattgttgaataaattcagctgcgcgttggtgattaaaaatattaatttttcttaaaccatttcctgaaagagtctccattttaaaaccgtctaaatcactgttaattaaaatccgaagacgggcaaccggtttaaatgggttatcagtatcgagacttcctaaatattcaaagtttccccggttagtctgttcaaatcccaaatcaagtaaagcatattttttatctctgggctaattgtgtatttatccttatcaccagaaatttgtactgtttttgtaaattccattttaattgtccccattaattttctttaggttttcaacggttctaacaatcgtagcaattaactgatcaatatcttcttccgtatttaacccaccaaaactaattcgaattgattcactaattcgggggctatcagcgccaaacatcgctgttaaaacgtgagaaggttcaatactacccgctgtacatgcagaaccaccagagactgcgatgcctgcaaggtctaggtctgtctggataacataagttgaaattcccttaaaccataagttaagcacgtgggttttgttgatttgtccattaatttcaaaatcaacattattttccttaagcgcattaacgatcttttgcttaaaggcataataacgatcacggcgttcttcttttacctccggcgtgtttaattctaccgctttagcaaaaccggcaattccaggtacattttcagtccccgcacggcgtttagtttcttggtccccacccttaataaagcttggaaaactaatgccatcacgacgatataaaaatcccatcatctttggcccattaatcttatgggccgatgttgaaagcatatcaatatgatcagctttaacatcaattggcaacagtccatatgcttgaactgcatctgtatggaaccatgcttgatggtctttcaaaatttcaccaatctcatggataggcatttgactacccacttcattgttttccatcataatggttactaaaatcgtatcatcacgaagagcggccttaaaatcatcaattgagatattaccattttcatcaactggcaaataggttacctcaaagccatgttcttctaaaaaatggagaggttttaagactgcctcatgctcaatggcagttgtaataatatgcttaccaagattctgccgtttaaaagcagtttggataatagcagtattatcactttcagtcccccactggtaaagataatctcattatcatcagcattaatgctttgggcaagaacgtgacgactatcttccattacaagtttggcatgacgcccataagagtaaccagttgaggcatttccccatgattcttgcatttgtttagtcacttccgcaatcacttctggggtcattggggttgttgctgcattatccaaataaatctcactcacgagtttttcatccttccatttacttatctaaatctgcaaagagctgaagaagcatgtttgcagagcgttttccggcatcaataataaagtcgtcaaaactaacgccggcatcttcatcacctgtatcagacattgcccgaactaccacatatggaatttggtggtcagtggcaacttgtccaaccgctgccccttccatttcactagaaagtgcatcagggaaattattcaaaatctttttaattgcttctgagcttgcaataaattggtcaccagaaacaattaatcctcgttttacatttaaaccagtcttttcgccggctttttctaaggcttgtccccattgatcagaagccttaaagcgcggttctttccctgggagttgaccataacggtaattaaatgcagttgcatcgacatcatggtaggccgtttcagttgaaattacaatgtccccaacatgtaagccttcaccaatcccgccagctgatccagaattaatcacaacatctgcctcacaatcggtaattaaatgttcagtagtaatcccagcttccactttaccaattccagattctactaatacaacgtcttgattactgatcttaccgaaaaggtaggatttacccccgatttccttttcttgtttatcagataacttcgcagttaattctttaatttcttcaggcattgcacaaataattccaaatcgcatatttttctcctttttatccaacataaaatagtattaagtaaacaataataattgccacaatcaaagcaatgattgcaatatttaagcgacgcttcaagcgcgctgttttttctgccactgtttcgtcatgacgctgactagcaactgcttcgcgactataaggtcgatcagttgtattttctgccgcttcattaggttgttcagtctgacgttgctgttgacgatattgactacgtgacatacgtgattgttgctcatcttgttgtttattatccacggttgttcattccttgccagtaatagattgccatgattgtcttagcatcttcaatttcgccttgatcaatcatttcaagcgcttgtggtaaagttacttcttttaacatcaattgttcatcttgatcttgcggcagctcgttgctaacccgttttaatcccgtggccaaataaagagtcatgtattcatccatacaaccaacagaagtataaaatgaagaaatcttttttaaacttgttgcttcataccttgtttcttcatttaattcacgtttagccgcatgaagagcattatcagcatcccgttggtcgagcttccccgcaggaatttcaagggttgttttcgcaattggtgcgcgccactgtttttcaagaatcattttattatcagccgtcaaagccaaaatcgcaattgctggtgcatggtggacgatttctcgttgtgttttattaccatgtggggtgataacttgctgtacttcaacatcgattaaatggccgtgaaaaactgttttactacttattggtcgctcttcaaattccattagaacccatccttatcttaaaacacgaacatgtgctgcttgtggtcccttttgtccttgaacaattactaatgagacctcttcatcagggtgaaggatacgacgacgcgttccttcaattccactataatgaacaaaaatttctccttcgtgaggaactgtaataaagccccatcctttttgttcgtcaaaactttttacttttcctttgagcatttttaccaactccataataaaataccaagcaacaagtgtcacttggtattttacaccgcttaaaaataattgtcatttactggataacgaaaaccagtttttttagagattattcttctaaaccatcttctgctgtttcagggaaattttcccgaacaatcgcagcacagcgagcacataattcaggatatgctggatcactgccaacatcttccttaaccatgcgacaacgagcacaagtttcaccattagcagttgtaaccttaactgctaccccatcgttgtattggtcagcatcagcaggcgcttcatcagctggatggacatgaagagcagaaacccctagcaataattgaatgttttcattaagactatcaagtaattgcttttgatcatcggttaagtaaagatcaacttgagcttcaagtgatttaccgattagcttagcattccgtgcctcttcaagactcttcagaacatgtgaacgtacttccataaagtcatcccacttgctcaatagctcttcttcgccagcgaatgtccgtggatctggaatttcagttaattgaacaaaatcttctggttcattcatgtagctccatacttcttctgtagtatgagggagaattggcgtaagaagtttaacaagtgtcaaaaggatatcgtagaagacggtttgcattgaccgccgaacttctgaattttcagcctcaatatagagcacatctttggcagtgttcatgtagaaagctgaaaggtcattgtttacaaagttgatcaatgccttataagcatcaaggaaatcataattatcaaaatcttcccgcattgtctttaagaagtggttaagtttaaccaacatgtacttgtctaccgattgtaacttctcataagaaacggtattttcttcaggattgaagtcactagtattagcaagtaagaagcggaacgtatttctcaacttacgatatgcttcagaaatctgttggaatgttcccatcgatacacgaacatcagctgaagtatcagcactcattacccataaccggataatttccgcacccatttgttgaacaaccttatttggatcgataacgttaccttgagatttactcatcttgttaccgcgcttatcaagtgtgaacccttgagaaacgatttccttatatggcgcatgtcctgaacatacaacactggtaatcaaactagagttaaaccaaccacggtattggtcagacccttcaaggtaaaggtccgctgggtatgttaaataatcacgttcagctaataccccttggtgtgatgaaccagaatcaaaccatacgtccataatgtcagtttccttagtgaacttaccattaggagaatgttcattagtgtatccttctggcaaaagatcttttgcttcacgttcaaaccaaacattagaaccatacttagcaaataattctgctacatggttgattgtttcttcttccatgattggtgtgccatcttcagcatagaagattggtagaggtacaccccaaacacgttgacgagaaattacccaatcaccacggtctttgatcatattgcgaagacgaacctttccccattctgggtggtacttaacgtcttctaaggcgtccaaaatactttgacgcatcttttcaattgatacaaaccattgatcagttgcccggaagatgattggttgctttgtccgccaatcaaatgggtaactgtgttgtaatggctcttgaagaagtaaagcattgttttcttctagcttttgaagagatacatcatcagcatcttggtagaataccccttcaaagccttcaccgttttccttagttaaaacaccttgatcattgattggggcaaaaattggcaagtcatactttttaccaaagttgtaatcatcatccccatatccaggagcagtgtgaacaaggccagtaccagcatcagcagtaacataatctgctaaaccaacaagaagatcacgatcaaggtatgggtgttgagtagtcatcccttcaagttcttgacccattaaatgatcaacaacttcataatcttcccacccaagtttttctgctaatttctcaagcaggtctgttgcaacaacaaatttccggtcatcatttgctggctttacaacagagtaatcaaactttggattaaccgcaactgcctcagaagcaggaacagtccatggtgttgtcgtccatacaactaaatatgtatcattatctaaacggcctttgccatctttaatttgctctacgaagaaggctgttttagcaacaacatcatgatattcaacttcggcttctgctaaggctgattctgaagaccatgaccagtaaactggcttcttagcttggtataatagacctttcttagcaaattcaccgaatacccgaatttgagcagcttcaaattctttatcaagggtaaggtatggatgatcccattcaccacttacacctaaccgcttaaagtcagtccgttgcttatcaacttgcttaagggcatattcccgacaaagatcacggaattcagttaagctcatcttcttacggtcgtaaccggacttagtcaattggtgttcaattggcaatccgtgagtatcccaaccaggaacataaggtgcccggtagccagacattgacttatagcgcacaataaaatctttagaaatcttgttcatagcgtggccaatgtgaatattaccattagcatatggaggcccatcatgtaaaacaaaagtaggctttccttcatttagtttttgtcgtagttcataaactttattttcttcccatagctgttcccgttgtgcctcagttacaggtaactttccgcgcattggaaatttagtacggccaaggtttaacgtatctttaacacgcattgtaactacccctttcattaattcttgtattttaataataaaaaagcttcctcccattactgggacgaagcttcttcgcggtaccacccggatttaaaactttaagattaaagtttcctcatgtcattagataacgataatgaaccgcctcatcctaactaactcaaatgaggtactccgagatgatcaggaatagttaaacattatcaacctctcaccaattgttgactcgcttcaacgttatgataattattccaattctcttcaacgattttattaaaatacgattctagtgatttacttgttattatcagggaagacaacaacagtttcaggtgcatctgatcctttgtcatcgttaacagctgttggttgtacaggtgtactctcttcttctgtttgttcagcagaagcaactggctgttctgattcaacaggttgttcttcactagcagttgttgcagttgattctacactggttggtgaactgctgtcaagacgactacctaaaattttttcaatttcgtcatatttactcaagtcatcattttccaaaagcttgtcccattcattactcttaatgacttctaattgagattcaagcatgacttgaagccgttgacggaagatccgagtctgtttacgaagatcattagtttcacttgttaacttcttagtagaattagcagcgtcttcaattacttgatttgacttatcattagcttccgaaacaatatcggttgcttgcttttgcgcttcacgaatcataatatctgcttcacgcttagcattatttttaaccttatcagcggcctcttgagcaactaaaattgacttatttaaagaatctttcaagtcagcaaagtacttaatcttgctatcgttagcccgtacttgctcttgtaaattattattttcagttattaattgttggaccgtttgtgaaacttcctgaataaattcttgaacttctttaggattataaccccgcatcttagtattaaattgcttattgttaatttgatcaaccgtcaaactcatgagtaaattcctccattcaaattacgcatttacaactgaaatggtaattctttctttgtctttttttgttttcccattggtcatatcgattctgaggcgaccaccatgacgcacagatatcaaatcatgaaccacaatttgataatctggacaatcaatctcttcccagtttaatcgaacttgaccatgctctattaattgctttgcccggtttcgtgaataattaaagcctgcagctatcacaacatctaaccgtagtgatgaaactgttgtaactatcggtacccattcctctttaggtgttaccactgcttctgttgcgatcggaatccatttaaccttaattcggccaacgtgctcaacgtttttccgtaaatactctgccattggtttcgttacgatcacttgccaatgcgctccatcagttaaaatatcaccaaatgcattccgctccatcccttcaccgattaatgttcccataatttgccgatggtgaagttctgaaaacttaacaggatagtttatctctaaagcctgtaaagtaaagtcttcgatagagggttcataataaggcggataaattaaaactcgttgcatttctgcgccttgccaaccaccatacattgttattttaacattgttatttcgattaacaatcgtttggataataaaacgttcacgtggatttaaaaaaggagtgaggacaggacgatattgaccttctgcagtggctacccagtcatttgcttggtcaataagggtggcttcatccggacgaaaatgttgtttaatattatcttcgctcaaatttacttcctcttagtattaattaaatgattgctgctatatgtgctaatcctgcctgaacaaaatatagtacaaggatagcgatcatcggcgcaaaacttatcccccgattggaggaataaaatcaaaccaatgcatataaggttttaccaaccgattgataacatcaccgagtcgtgaattacgtgcatttggaaaccatgacataatgcaccacacaactatcactaagatataagcatcaactaattgattaagagcccataataaaaatgcgatcatattaactccttttagtgattaaaatttatcaccatcattttttagattactcgttaaactacctgagatttcatagtttttagggtgcagaggaaaatttcctttccgatccgtttcatttcaccatcaattgcaaaaacggtgccatttaagaagtctactaaccgtgctgcaacatttgtatccatttgagtgaaattaacgatcaccgcatgtccttctaataattgggatgcgatctgctttacatctgcataaagacggggttcgtataaggaaatctgactcattttgttaagacgcccgctattaattgaaactactttgttgcttgtgtttgctggcgttgaaacttgttcactcgtttcatagagaccatcttgttcatcaatgtcttcttcaccaaataggctttttaaaaaatttgctgccattgtattaccctccttaataggtctaaacagaaaaaggcggattaaaaaatccacctttttgctaaattatttacttacgacgattcttgaagaacggtggagtcgataagttagtatcatcattgtcatccgtattagccgcatcatcgttaaatacgttaaattctggcttagtaacgtgagaaaattcgttatcagaatttcttgattggttacttgtatcggctgttggatcattccaaccatcaaaaggatctcgttgctttggttgttcttcttgcggaataggccgagttactcgtggtgcttctttttccgctggcttttgttgttgaattttctttttcttatcaattccagtggcaattacagtaacgcgaacttcatcgcccattgattcatttaaggacataccaaatgaaatatcaacattagttccagcagcttgtttaatcacatctgatgcttcttgagcttcaaacattgataagtctttaccaccagtaatatccatcaagacatgttgagccccatcaattgacacttcaagtaatggagaagaaatagccttcttagttgcttcagtagcacggttttcaccagtagaagcaccaaccccattaaggcagaaccttgattagacatcaatgtcttaatatcagcaaagtcaaggttgatgtaacctggggtaacaattaagtctgaaataccttgtacaccttgacgaagaacattatcggcttctttaaatgcttccatcattggcgtcttcttatcaatcatctctaataaacggttattagcaacgataattaaagtatcaacatttgactttaacttttcaagtccttctgcagcatagcgtgctcgacgaggtccttcaaatgagaacggacgagtcacaacaccaacagttaatgctccactatccttagcaagcttagctacaactggggctgctccagtaccagttccaccacccattccggctgtaatgaagaccatatctgcgccttcaagagcttttttaatttgttcttcactttcttgggcagctttttcacctacttctggatttgaaccagcacctaatccctttgtcaatttaggtcctaagcggatcttagttgttgcttgagaattatttaatgcttgtaggtcggtgttagcaacaataaagtcaacaccttgtactttttcagtgatcattcggttgacggcattaccgccagctccaccaacaccaattactttgatttgcgcttccgcaaattggttgtcgttagcgaacgtttcgttatccatagcagtattcctccaaattagtcaaataaattattaaaaatgtttttaaaccgattacttaggccattttgctttttcttctttggcgctggctcttcagtaactggttgctgctgtgcttctcgctgtgaacgttgtaatttatcagatttttcagtccattgttgacgtggctgattaacaacttgtcttttttcttcatgaggactcttaatcgtatcaattcgttgaacagtttgcttaattaatcgatcaatatctgataactgattttcatacatccccaaagctaaactaaccgcatagcgagggtgacgaatgcccatttgttctggaacattcaccttaatattaccagtaaagtactgttcagcaagttccttaactcctggcagagcagccactccaccaatcaagactactcctcccggtaattcaggggcatgaatagccttaagtttatcctgaatacgatcaaaaatttgccttactcgtgcttcaattatttctgataaatactgctctgaatattggacaggatcattttgaccaacaacatcaacgtcaacttgaacatcttcatcggctaaggatgccatagcatatccatgatttagcttaagttgttcagcgttttttaatgatgtattcatgaccgtagaaatatctttagtaatgtatttcccaccctcaggatcaacataagtatactttaattgatgatcatgaataatactggtcgttgtttgaccaccacctaaatcaataacaacagtaccaaaatcttgctctccgtcattaaggaggttaaagtctgttgcgatcggcgtaataacaaaatctttaatgtcataacctgcctgttgaactgccttttttgtattatgaataatggtcttaggtcctgtatacaaggtggccttcatttctaaacggacaccaaccattccacgggggtccttaataccagaaaagccatcaacagtaaattctgttggaattaaatcaattatttcccgctcggggggaatactttgcgtcaacgcttcacgagcaacgtcaattacgtcttggttaacaatctctcttgattgtcctcttgttgcaatcgtaatcataccgtgtactcgttgcatttgtaagtaatttgccggtaagccaactacaacactttgaatctctacgttggacttttcctcggcctgtgctaccgccgccgaaattgcctgggcggttttatcaatgtcgacaataactcctcggtttaatcctgccgatcgttctacaccaacaccaataactttcaactgacccttaacactttcacacaccagtgccttgatcgaggtggttccaatatctaatccaacgtatacttctgaattattcattctaaaaggaaccctcctaagactatcattaattaaattaattgtattttaacctatataagaattttaccacagataaacaatgacaaaaaagggaattatcaaggtttttcacaaaatcatttatccttagatccatagtcataagaataagctccgacttgaagatctataattcccttatttttcatacttgctgcaattgcagggtaatatcccattttatccccgatagtatttaagtcgccataaactgtattaccatcacgcatataaataataacgcgatctggatactctttagtgggttgataactcacacttgaaataccatttcttattgccagtttcagctttcctaactgagcggccgttgtagcaagaacttttttatgaccatcaaaacgtttataagcaataccattatcagcattttttgttcgctgtaattggccgtcagctaaaacagcgtatgtatcattattcatcaccgctgttcctaaaagcgcattttcttttacagatatttgcagagactggggaccggttaccttgatccttaaatcttttatttgaggatttttgcgaatagcttgtttagtgagttgatgacgagcaagataaacgccccaaataaaccgtcctggataaatatttgcatttttttctacttgctcttttgttaagtcatgattacccgttacatgaagcgtggtaattttgcttaagggagaaataatataaagcataaagaggagaatagcactgaacaatacaactaattttaagactcgctcgccgttagaaacataacgcttaatcttaatcccgcgaatcttattaccaacatgcatttttggaggcttctttttctgttgtcgctgttgggcagcagcacttcgcctttctaattcagttaaccgctgtgaatatttatgatgctcaatcgcagatctatcatccaacatctctcctcctccttcctaggctatactttatttttcgtgttcatcaattgccttatgtaagatcttaattagtctatcagcggcatctggccgacccatcttttcagcagcatgcgccatctctttacgcacttcttcatcttccataatcttatctgcttgagtcaataatgcccgggcatctaacttatcttcagtaatcatcaagccagcgttattcttaactaaagcttgagcattctttacttgatggttagcggtaacatacggactaggaattaagattgtaggaactccgagtgccgttacctcagcaatagtggttgctcctgcgcgcgatactaaagctgccactcgaggcatcttagccggcatgtctttaatgtaaggaacgactttaacattatcagctggtctaatattattttctgcaagttgcttttttacatcatcataccgtttttgaccggttgcaaagataacctgataaggacgcttattgaattctggaatagcgtcgacaactgttttattaatttttggtgctccttgacttccccaaaaatcattaaggttggaatatcatctttcaagtcataacttgtccatgaaaagtcactatcttttttagcagctacctgttgagcacgaggattacctgccattgtaactttatcagcagggaactgactgcgtgcagcttcaaatgcaattgcaatttgatcaacataccgacttaaaaacttgtttgttacaccaacaacactattttgttcatgaattacggttgggatatgtttctttgcggcagcatataggacggctccacttacatatccacctgtacctaaaacaacgtcaggcttaaactcattaataatttttttagcatgatgaacagaacttaagaaaagatagattgtcttaaaattttcaagagaaagagaacgcttaaagccctgcatatgcattgtttcaagctcaattccggcatccggtacaattttattttcaaggccacgggttgttccaacatataacacttcagtatctggatcaacctgctttaagcgttcgattaatgctaatgctgggtaaatatgaccaccagttccaccacctgataccaataaccgcatcttattgttccttctttcctgttaatttttcaactgcttcaataaatttatcaccacgaacttcaaagctcgggaattggtcccaactagcattagcaggcgagaggagaatgacatctcctggttcactcagcttccatgcttctggtaccgcagtaattgcattttcactttcaattactggaactccagcttgattccccgcatccttcattttatctttacattcaccaaaaacaatcattgccttgacatgcttcttaaagtaaggaaccaaccgttcaaaggtataaccacgatcaaggccacccgccaaaagaactactggacgatcaaagccttgcaaggcaacttcagtagcttcaatatcagttgattttgaatcattgtagaaaagccgttcttggtattccatcacatattgtaagcggtgacggactccactaaatgttgttaaaactttctttattgcatcatttgtaacaccgcttaattttgccgctgcaattgctgccaatgcattttctacattttggggaccgatcaatcgaatatctttggttggcataacctcttgtccacgccagtaaatcattccatcttctacataagatccttcatgactcttattgagacgagaaaatggcacaatggtagcttgactacgctgagcaatcttttgccattcatcacgatcccagttaataactaagaaatcatccttggtttggttccgggtaatattaagctttgcattaatatagttttctcgtgtcttatgatagtctaaatgattagaaaaaatgttagtaataattgcaatatgcggatgaattgttggtgctcctaataattggaaactagataattccgtgaccaatgtatcgtctggccctaaatcctcagcaattttactaaaggaaattccaatattacctgcatatttcacttgatattttgcattttcagcaatcattagttgagttaaagtcgttgtggtagtcttcccattacttccagttacacttacaaggtgaccatcaaaaatttgccatcctagttctgcttccgtaataataggtgtcccctgcttaacgaatgcagccactaatggattatcataaggaattccaggattttttactacaatatcgaaaccttcattagctaatgaaatgggattatcaccagtaattaccttgattccatcagcttctaaatcatcaacaatatcattatttttaggagttgctttatcattagcggtaacattggcaccaagttttaccaataagtgagccgcattaatgccactaattccgaaacccattacaagaacttttttaccttgatattcatcaatttttttcatttctctttactcctaacctactaataagattgttgtaacggcaataattgcagcaactaaccctacaagccaaaacacaatatcaattttccattcactccatccgttcatttcaaaatggtggtggattggggtcatcttaaaaattcgtttaccggttgttttgaatgaagccacttgaagaatgacactagcagtttcacaaacataaacaattccaattactaataaggaccattcatgatgtaataacaatgaaacagcggctaaggatgccccaattgctaaagatcccatatcacccatgaaaatcttagcgggcttatgattataagggaagaaacctagtaaagttccgatcattgctaaacagaaaagagcaatttcaggataacctggttgattgagatttactaaagcaatgattagataagccgcaaaagaaataatggaaagaccacttaccaagccatcaagtccatcggttaaattaacagcatttgaaaagccgacgatccaaaaaataataaacaaaccgtaaagccaaccaatttgagttgttccaaagcccatttgaaaaccttcatgttggtaaataactgtaaagaccattgctgctaatacctgacatagcgccttttgccatggtttaaatccttcattttgatggtggaagattttaatactatcatcccacatcccaatcaggccataaacaaccaggacaaagaggagtgcccacagcgtattcgtaattaacccttgccaagcagcaacccataaaattgttactactgcagagaagatgaacaataatcctcccattgttggcgtcccagcctttttagcatgccaggtagggccttccttacgaatttgctgaccttcttttttagcccgaaaatatttaattaacgtgggcatcaataaaaacgtaattaagaatgaactaagaatagtcaaaactgcacttaagaaattcatatttacctccaattagtttctctgctagtttttagcttcatattgaacggttaaagttgttccacgcttaatagttgtatcaggtaaaatactttgctgagtaacatagccgtttccattttcttttacttttagcttaaggaccttagctaattgttgaacatccgcagaactccatccagaaatatctggcattttatactcgccaccagtatcaagaataacatgttgatctgttaacacttgttcgtctggaactgctgattgttgtttaactttcttgccagaacctacaacaattacctgcattcctttacctgataattctttattagcttcatcgcttgcttgaccaacaacattaggcattgtaataacctttttcttgaccttttctgcaactttttgttggctcaacaacattttcattgtcggattaaagacgctggcaatttgtttggttgctgtttttttaaggttttgcggttggcgaagggtgacatacataatatactttggatttttagctggtgccatccctgcaaaggagtaaaggtagtttgtatcaccagttgaataaccatgagcaccaccaatttgtgcagttgcggtctttccagcaattcggtaacccttaatttggtaatcatggccaaggcccttttgatcataaacaacgccttgcatgtaaccaaggacctttttcgctgtcgatgcttttattgggtgtccaacaactttaggcttaaccttttgaatcgtctttccgctattaccatctacaactttgctaacaatgtaaggcttcatcattttaccattattgccaatagcactaaacgcttgcatcatctgcatgacatttacagtaattccctgtccaaaagcggtatttgcctgagcaagaatccctttgaatgaagtataaccattaacctcgttactcattccgataacattaactttttttaacaggccaaatcgtttaatgtacttcatccatgtctctgctcccatgtcctgctctacatgagcaaacccaacattactagacatatcaaaagcatctttataggaaattgttccccaaccagaacttgaccaatcagtgatttttccgccacccatagcccatgttcccgaattaaaggtcgcattaggattaaaatgtccggtatcaatagcagcagctaatgacaaaattttcattaccgaacctggttcataagcatcttgaactaacatattccgccaaacaggattattttctgcatgaagagttggccgttgcgtagcggcaataattttacctgttttagcttccattacaactgcagtcattgcattggcgttagaacttttataaactttattaactttattttcgagaaaatgttgggtttgtgaatcaagggtagtgtagatattatctccattgacggcttttttagttacctgcttagaattagcaatttggtatccatagacgtcctgtttatcttttctcaacccgtttattcctgtcagttgtttattaaagtagccttctaagcccaattgtcccactaagttggtctcttcagttccattatcatttttaactttaggagttgccatcccaattatttgagaagcaaattcgccttctggatattgacgtgctggagtcgcaataaaattaattcctggcaagtgccggttcttgatcttctgcattgttgaaacagaaaggttgcttccagcatttccaaattcaacttggtaggcttgcccttttggtttaagaatcttttcaatttgctttggggtcaggtcaatatactgtgataataccttggcagttttttttcgatcttttacatataacggtttaccatcagaagacttttgggttcgatccaaaaccgcatagagggtatatttacttgtatcagttgccaagggattcccttctgaatcataaatatcaccccgtcgcgcttgaataattcgctgctgggtataaatttgttccgcttgtgaccgtaagttaacatgttgaacatccttatttattgcgatatacgcaaaacgaacgataaataaggtaaacaatccaaccgtgattagaaagagccatttgccaaaggtccctcggttttctctatgtcccctatttttcgttcgttgtggcttcttattcattatttattaacgttccttacatttgaatttttatctgataatccatatttatgtgctgctgatttcaaatgcgattgagtcgtcaattcagcgatttcttgctgcaaacttgtattactactttttgccttagtaatttgagtttgggtatcctgtaagcgccgttgctgattattaatactaatttttgtagaaagtaagctaatcattaagcatagcgtaattaagctacctactgctactaaagatctttcaaattttgaccatctaaccggacttggagaaatttttagttgttgataagtcttttttcttggcgcttgctgcggttgttgctctcccgccagttgccttgccgcatttgaaaccataattctgtcactttccttctctaattttctcgattatcctcaacttggcactatgcgcacgatgatttgccgctaattcttcctcactagctacaatcggctttttattaattaatttgaagtttggttccattcccgctggtattactggtaatccctgcggtacatccccacttaatgaagtcttttcacgaaacattgtctttactaaccgatcttctagggattggaaggtaataacacttattcgtcctccaacatccaacaagtctaatgcttgctctaacgattcctctaaagcacctaattcgtcgttaactgctatccgaatagcttgaaaactctttttcgctggatgaccaccatgacggcgagctgctgctggaattccctctttaatcacatcaactaattcaaatgtcgtctttattggtgctatctttcggcgttgttcaatctttctagcaattgacttggcaaatttttcttctccatatcggtaaagaatcttaacgagccgttcatatgaccattcgttaacaacttccattgccgacaatttttgttcctgattcatccgcatgtctaagggggcgtcatgctgatagctaaaacctcttttagcatcatcgaactgtggagatgaaacacctaaatcatataaaattccattaacatgttttacattatagctatccaattccgcttttaagttgcggaaattatcttcaattaatgttaatttttgttgctctattactgtttttaagtgttctttattgtaattaattgccgtctgatcttgatcaaatgaatataggtggccatcgacgagctgttgtaaaatagcttgcgtatgaccaccaccacctaatgttgcatcaacgtaggtacctgttggttgcacatttaatcctgctacggcctcctttaaaagtaccgttacatgtttaaattctgccatcaactaaaacctccattaaaaatcaatattaagatcttcagcaatctcatcaaaattatcagctgtttcgcttgtaaatttattccaccgttcagcgctccagatttctaagcgattagacacaccaacgattacacatttcttttcaagtgaagcatgagttcgtaatgttatcggaatattaatccgtccttgtttatcaatttcgcaatctgtcgcagcggaatataaaaagcgtacaaatgcacgtgcatcacgctttgttaatgggagcgcctttagcttttgttctaaaatcgcccattcatttaatggatatccaaacaaacatccatctaacccccgagtaacaatgaagtgtgcccccaattgttctcgaaatttggcaggaataattagtcggcctttggaatcaatagtgtgtgtaaattctcccattaacacgactaatgtcctcctttaccacgttataggtcaagtctaccacaatcccccacttctcaccacgtaattttgtgaattttaccaaaaagtaatagacaaaaaaagtgagcagaaaattaattttccaactcactcaatatttttatatcaacggtaaccatggtgaaataattaagctaccaatatatataattaaagcataatatgccgaataccgccaaaatactggccagtaacggcgataaatgaattcatgattgtgaataatttgtaaagcaattaatagcagagctagaatcatccataaggcaataggataagctggccaatagaatccaatattaaagattatcagaatccataaaataattgtccatccccaccataaatgctttgtttttttaggatgatgaaatattcgtactaataatcgttctactatcccaatcactaataataaaataatctctaaaattataacttgaatactaaccatcaaccttttcagtccccttctctttaaataagtaatttaagtttaacataatctaaaactagatttgaaaaaggcattaaagatgcgttacactactattattgataaaaatggaaggatggttaataatgcagcgaaaaaagaaaactcgtttccaaaaaattaccatggttgctatttggctcatgttaattgcaatgcttggttctttaatctttggagcagttgcatccttaaacttaatttagcctattaaacatccatgtaatcggaataaaaaaagatcggagaaaaatttctccggtcttttttattcctcacttttttgcttataaacttcccgtggttttgagccattagctggtccgataaaaccgcgttgttccatatcatcaataattcttgctgcacgattataaccaattctaaatcgccgctgaattagcgaagttgatgctttttgttgatcaaccacaaaatctaatgcttcagggaataattcatcttcctcttcagcttgctcttcttgctcaatttcatcgtcagttacaaccatattatcgtcatactcagctactcgctcgttttttataaagtctactactgattcaacatcatgatcagaaataaatgcaccttgaatccggactggcttattttgatcaattggttcaaataacatatcacctcgaccaaggagcttttctgccccattagtatcgataatagttcgcgaatcaaccccactagaaaccgcaaaggcaattcgagaaggaacgttagccttaataagccctgtaataacatcgacagaaggacgctgagttgccaaaatcatatgaataccagcagcccgccccatttgtgcaatccggacaattgcatcttcaacatcatgagaaacagtcatcattaagtcggctaattcatcaacaataactaaaattaatggtaggttagcttgaacttcatcaggatggtcatcattttgttgtttgaccaacttattatatccatccaagttacgaacaccgaattttgcaaacaattcataacgacgctccatttctgcaacaacttttcctaatgcccgagctgcttttttgggttcagaaactaccggactgagtagatggggaataccattataaacactcaattcgacttttttagggtcaatcattaacatctttacctgatgcggtttagcctttaataaaatgcttgtaatgataacattgattgcaacagacttaccactaccagttgccccagcgataagaaggtgtggcatcttagttagatcagccattttgatatccccagtgacactgcgaccaagcggaacttccatgggattatcattactaggagcattttcgaccatatcgcgaaaaccaactgttgcaatttgctggttcggaacttcaatcccaattaatgatttccctgggatcggcgcttcaatccggatatctttagccgcaagtgcaagtgccaaatcatcagccaaatgggttattcgactaacctttactcctactgctgggcgtaactcatatttggtaacggaaggacctaaattaacattttcaactgttgcatccacaccaaaagattttagagtttgttggagcgttttggtgttctttttgatattattcaaatcttcctgctgatctgttgcttttacttgacttagcaggctgactggcggcaattgataatcattgtcttctttagcgtcaattcctgcaagtttaatttccgcatcatcacgttggttcgagtcctgatcatccttacgtccactctgagtttcttccacctgactttcacctgcgaccctaatagttggttcaacaggatcttgagcaggcatcgctggagaaactggcggcgttgacgttggctctgctgattcttggtcagcaaaaaaatctttaacctgccttgatgctttagcaaggggcacgctaatcgatggtaccgtagttgtcttggttgctctctccgttctctttttcattaattgatcgtgagcattagccatggctgctccagattttttaatgccaatcccacattttactagaaattcgcgccatggtaatgcaaaaaagacaataattccgataatcattaacaaccatgacaataccgctgttccaacttctgaaattaaaatattacttccattatataggtaagcaccaatcatccctccaccaaccggaacagttgaatcaccgttaaaaatgaccttactaagactattccaagtagttttgattacctttgcatgaagattcagacgctgaaacattactgtctgaagccacattaataaaccaatataggcaataatagttcctgcaatccaacgttttttgaaatgcggacgatgcccatacaatgcaaaacataatccataaagaaaaacaataatcattgcaattggaaaggatgaccctacaaaaatcttaaaacagttatcgagaaaggttcctaatgctcctaaattaaataagccaactaacattaagaggcaaacaattattcctaatagattatccattaatcgatactgttgttttttccctcttgtccggcgggatgatgccttttttcttctcgccatcgcattattgcctccttaaggttactttaatttatcgaattcatatttatgaacgcgggctaaattaggaaaactctgttgccgcaatacctcataaataacaatcgctgcactattcgataaattcagggcccgaatattattatcattttgtggaatccggatagcattttctggatatttttgcataaaacgttcgggcaagccagttgtttcttttccaaataggaaataatgatctccttcacccgtataatcaacatcactataatcatgagtggcaaacttagaaacaatatataaacggttaatatcaggaatagtcttcataaatgaaggtaaatcctcatgatacgtgatctttactttatcccagtagtctaatccagcccgtttcatatgcttatcatcagttgaaaatcctaatggcttaattaaatgtaattcagtatttgttcccgcacaagttcgtgcaatatttcctgtatttgctggaaacaatggttcaaacaagacaatatggtttgtcataataaaatctccttaataaaataaaaaaagcagggtctcggtgtgggcacggcgaaacgctgctttaatgaagtactccttgataattaccaacgaaacacttatattcgatgtcaattatcaaacgatttcctataataatttagcactaatttagtaatgttgcaataattaattagcttttttcgcaattaataagctgacatccaccgtaattgtttttaattgggttaattcttctttagataatcttttagcgtttgctccccagtgtaaaggcgtcatttccagcattgcctgttgtaaaccgtctggaattctaaattggtaggttaccgtttcaactttactatgaggataatgccggttaaataactcgattactcgtgaattatcatagtggtaattacgttctcctgtttcatataagaggtgacgtaattcgactaagtagttagcgttaggaattaccttaataagggtcccatcttttgttagaacccgtttaaactcttgataataagatggagaaaacaactctaatatacaatcaaaactctcatcattaaaaggtaatttacgtaaatcagctacacaaaaaaatgcctttaacggtaactgagtagcaagcgttatccctggtttcgaaatatcaaagccaatcatcgtatcattacagttagcacggattgtttctaattgtaataatggtgttccttccccagttcctacatctaagatccttaaagattttgaaggtaagaatttactgatattttcaataattggcttaaatagtcctgcatttaatagctgacgacgagattcaaacattgagcaatcatattcagtattagccgctccattaagaaagtgaagataaccatgccgattaaagtcaaatcggtggttatttccgcaaataatactatttccttcaactctatccattggctgttcacaaacagggcattgaaaaagggcaagattattttttaccatttctcgttgacgttcaacttttttcaacttttttcctccattaacaactaaaaattactaataacagtgtatcacagctagaattacgatgggcaaattgctattatataggtaagcattttcaaaaaggaggaaattgccttgattgaacaatttctaattggaacttatactaaaaaaacaagtaaagggatctacaaagttaccctcgatactgaccaagaaaaaataacgaacgttgaattagcaattccatctcaaaaaccagcttacttacaagttggtcaagatggtcgtatttacgcaatcaaacaagtagatgacaaggggggcgttgcttcttactcattaaatgacgataacgctaagatgctaagcgatgtcttagctgccggtgctcctcctgcatatgtaggcgttgataacaaacggcatttattattcagtgctaattatcatacagcaaaaatagatgtttttaagatcaacgaagatggaacgttaacacaaactgattctgtccttcatgaaggagcaactggtcctgaacctgaacaagaggctccacatgttcattatgccgatctaactcctgataatcgtctagttgtatgtgacttaggaatggatcttgttgtggtttacgatgtctctgatgatggtaaattaactgctgtttctcgctataagtgtgaagatggctttggtacccgtcatatagttttccatccaaatggcaattatgcttatcttttgggtgaactaagcagtaaactagaagtactcaagtataatagtaaggatgcatcatttaagcaccttcaaacgctcaaaacaattcctgaagactggacagctcacaatggagcagctgctatccggatttcaaatgatgggaaatttgtctatacatcaaatcgtggtgaaaacactattgccgtctttgaagttcaaccagattttaccgttaaacatatccaatctatttcaactgaaggagattttccacgtgatttcaatctaaatcaagatgaaaattatcttttagcttcaaatcagaactctgataaccttactctttataaacgaaatccatcaactggtaagttaactctccttcaaaaagatgttagttgtccagaaccagtgtgtgtaatgaagtggaaataaattaatatcaacagcgtgaactggaccctgtcaagtagacaataaattatacaaagtttcttaggcagcttgatgccggtattgtaccggtgttaagctgcctaatttttcgtaagcagtccgtatccacacgtctagccatcaaaaacttagtctcctatactaaaagcaatcttagtacaggaggctttttctatggaaggaaaacacgatattgtagcaccaatttttaagaccaagaattcagtagttaataaggaagaatttattcctcgacccaccgcaaaactacaagctgataacattgaattaacgatctttaagggagctaatcccagtcttgcgactgatatagctaaagtggttattcgttatgctcattaattggcaggcaccggagcatgtttaccttgtttgtggtaagacagacctccgtaaaggaattgacggtttagcgatggtagttgcggaaaactttggattggatttatataataattcgctctttttattttgtggtagtcgcaatgatcggttcaaagccctttattgggatgatgaaggtttcattctgctatataaaagatatgaaaatggtagtttaagatggcctaagaacaaaagtgaagttaaagaactaaagccagagcaactaaatgccttatttacaggtctatccccatttcccgagcgacatattcatacaattaaaccaggaaatctatactaagctctttttaaactgttttagctctgatataataacaaaagtttattagattggaggtgacgtacaatggctgagtcattaaagaaagaaaacgaagcactacgtgcgcagttgaagaaagctcaagaacaacttgaacaacaagcaattacgattaagcaactacaggaaataatttttggaaaaaaactgaagttttagagcaggtagctgatggacaattatcactgtttgatccagttgatgatctgaacttggatcaagagattactgaagcagttaaaacaacaacgactaagatcgtacgtcatcgaccagcgaagaaacagctaactcgtcaagagtttttagaccaacttcctcaagtcgaggaagttgtttctttaaaaacgaccacctgtccagattgtcagcacgaaatggctcacattggaaagaggttggcacgacgggaagctagactaaaagagcctgaattgtattgtgccaacttatatgaggaaagctataagtgtaaacactgtagtcaagatggaaatgataaattggtaactagtaaggcaccaatggctttattaccacatagttacttttcaagcagtattatggcatttatcgcctatttaaaatttaatctggcgttgcctttccatcggcaagaaagctttgtacaagggttgggattacctgttagcgccaagcaaatggcctcgaatattattaaagttagtcaaacgtacttagagccgttgtatcagtatttaagcaatacagttagacaagaaccagtcattcatatggatgaaacaccttttaaagtcgttgatagtcctaaatcccaagactatttctgggtaacgcggacaacgaaagagtttgcccaacatccggttgtagtctttcatcatgccaatacgcgttctggtagaatcattggacaaatagtcggtaataattatccgggtattatcatgtgcgatgggtataaagggtatagtaatcaactctatccgcaagcaaaatttggttcgtgcttagtgcatattcgacgagaatttgtcaaattggtcaaagcactgccaaaaacaatgaaggcgtccaaagcgcaacaagcaataactcttcttagtcaggttttccattcggaaaaccagttgagttatcaaacggccaatgagaagttagtgcagcggcaaatccatgtcaaaccgctaatggataaattttacaattacattagccagattagccagccgattggacagttgcgtaaggcaattcagaacgccatccagttaaaatcacgagtgtatcgtgtatttgaaaatggacaattaccgttaagcaacaattcagttgagcaaagtattcggccatcaacactaattcgaaagaattgtctattcgcaaaaaccgaagaaggtgccaagacgaacgccgtctactatagcttagtagagacagctaaactaaaccagcttaacgtccagcggtacttagaatacttgtttgatcacctaccagagagcaattgtcaagatctggcagcttttttgccgtggtcaaaaaacgtacaaaaagaatgttgcgaatagaaaatccccgtgaagccatcaaggacggttctacggggattttttgtctgtcaataacgtgtcaatatggactgcttacactgcttacctttcaactcatagttaatatccatgctgggcgtactaaaaaaggacatgcactgtattaaacaatgcatgtccttttactatagcgtggcaacgtcctatcctcgcagggagcgatcccccaactactttcggcgtgttgaagcttaacttctgtgttcggcatgggaacaggtgtatccttcaagccatcatcaccacactctttgtcccttcggacgagagcttgtgctctcaaaactaaatcctatctattctcttccaataaaccttaccgctccttggttaagtcctcgaccgattagtaatggtccgcttcatgcctcacggcacttccacttccatcctatctacctcatcatctctgaggggtcttactttcccgaaggaaatgggaaatctcatctcgaggcgagtttcacacttagatgctttcagcgtttatctcgtccatacatagctacccagcggtgctcctggcggaacaactggtacaccagcggtatgtccatcccggtcctctcgtactaaggacaggtcctctcaaatttcctacgcccgcgacggatagggaccgaactgtctcacgacgttctgaacccagctcgcgtaccgctttaatgggcgaacagcccaacccttgggaccgactacagccccaggatgcgatgagccgacatcgaggtgccaaacctccccgtcgatgtggactcttgggggagataagcctgttatccccagggtagcttttatccgttgagcgatggcccttccatacggaaccaccggatcactaagcccgactttcgtccctgctcgacctgtctgtctcgcagtcaagctcgcttgtgcctttacactctgcgcatgatttccaaccatactgagcgaacctttgggcgcctctgttaccttttaggaggcgaccgccccagtcaaactgcccacctgacactgtctcccagcacgttcagtgctgcgggttagagtggtcatattgcaagggtagtatcccaccagcgcctctgtcgaaactagcgtcccgacttctacggctcctacctatcctgtacaagcagtacaaacactcaatatcaagctacagtaaagctccatggggtctttccgtcctgtcgcgggtaccctgcatcttcacagggatttcaatttcaccgagtctctcgttgagacagcgcccagatcgttacgcctttcgtgcgggtcggaacttacccgacaaggaatttcgctaccttaggaccgttatagttacggccgccgtttactggggcttcaattctgagcttcgccgaagctaacccatccttttaaccttccagcaccgggcaggcgtcagcccctatacttcatcttacgattttgcagaaacctgtgtttttgataaacagtcgcctgggcctattcactgcggctggccttgcggccagcaccccttctcccgaagttacggggtcattttgccgagttccttaacgagagttctctcgctcaccttaggattctctcctcgactacctgtgtcggtttgcggtacgggcagttaactactccttagaagcttttctcggcagtgtgacatcggcaacttcgctactttaatttcgctccccatcacagcttgtcaacacggatgtaaacatttgactcacatcctgacttactgcttggccgtactcttccagtcgtacggtttgcttagcctcctgcgttcctccatcgtcaaacgcagttaactggtacaggaatctcaacctgttatccatcgcctacgcctctcggcctcggcttaggtcccgacttaccctgggaggacgagccttccccaggaaaccttagtcattcggtggacaggattctcacctgtctttcgctactcataccggcattctcacttctaagcgctccaccagtcctcacggtctgacttcgccgcccttagaacgctctcctatcacgtgcacatagtgcacatccacagtttcggtaatatgcttagccccggtacattttcggcgcaggatcactcgactagtgagctattacgcactctttaaatggtggctgcttctaagccaacatcctagttgtctatgcaactccacatccttttccacttagcatatatttagggaccttaactggtgatctgggctgttcccctttcgacggtggatcttatcactcatcgtctgactcctgagtataaatcaatggcattcggagtttatctgaagttggtaacccatgacgggccccttgtccaaacagtagctctacctccacgattctttacctcaaggctccccctaaagagatttcggagagaaccagctatctccaagttcgtttggaatttcaccgctacccacacctcatcccagccattttcaactgacacgggttcggtcctccagtgcgctttaccgcaccttcaacctggacatgggtaggtcacctggtttcgggtctacaactacatactttttacgcccatttaagactcgctttcgctacggctccggttttccaccttaaccttgcatgcaatcgtaactcgccggttcattctgcaagaggcacgccgtcacccattaacgggctccgacagcttgtaggcacatggtttcaggaactatttcactccccttccggggtgcttttcacctttccctcacggtactggttcactatcggtcactagggagtatttagccttgcgagatggtcctcgcggattccgacggggtttcacgtgtcccgccgtactcaggatcctgaacagagagtgtgacgtttcatctacggggctttcaccctctatggcacagcttcccaactgttgcgactacgtcgcactttggtaactctaatgttcagtcctacaaccccaacaagcaagcttgttggtttgggctcttcccttttcgctcgccgctactcagggaatcgatgtttctttctcttcctgcagctactaagatgtttcagttcactgcgtctacctcttgctagctatgtattcactagtcaagtaatcagcgactaagctgattgggttgccccattcggaaatctccggatcaaagcgtacttaccgctccccgaagcatatcggtgttagtcccgtccttcatcggctcctagtaccaaggcattcaccatgcgcccttcataacttaacctaaacaatcaaagattgtctgattaattgagttagcgattataattcgttaattaaaactcaaataacgcggtgttctcggtttattgttttgttaataaagaaattagatagtatttagttttcaaagtacaaactctatcaaccttatggttgataatggagaataacggaatcgaaccgatgacctcctgcttgcaaagcaggtgctctcccagctgagctaattccccatatgggcctaaatggacttgaaccatcgacctcacgcttatcaggcgtgcgctctaaaccagctgagctataggcccaaataagcgtcttataggttaaagttttaagaggtaaacctctcaaaactaaacaaagtttctccgatgtgtaggttccgttttattccttagaaaggaggtgatccagccgcaggttctcctacggctaccttgttacgacttcaccccagtcatctgtcccgccttaggcggctccctccataaaggttaggccaccgactttgggcgttacaaactcccatggtgtgacgggcggtgtgtacaaggcccgggaacgtattcaccgcggcatgctgatccgcgattactagcgattccgacttcgtgtaggcgagttgcagcctacagtccgaactgagaacggctttaagagattagcttactctcgcgagtttgcgactcgttgtaccgtccattgtagcacgtgtgtagcccaggtcataaggggcatgatgatctgacgtcgtccccaccttcctccggtttgtcaccggcagtctcactagagtgcccaacttaatgctggcaactagtaacaagggttgcgctcgttgcgggacttaacccaacatctcacgacacgagctgacgacgaccatgcaccacctgtcattgcgtccccgaagggaacgccttatctctaaggttagcgcaagatgtcaagacctggtaaggttcttcgcgtagcttcgaattaaaccacatgctccaccgcttgtgcgggcccccgtcaattcctttgagtttcaaccttgcggtcgtactccccaggcggagtgcttaatgcgttagctccggcactgaagggcggaaaccctccaacacctagcactcatcgtttacggcatggactaccagggtatctaatcctgttcgctacccatgctttcgagcctcagcgtcagttgcagaccagacagccgccttcgccactggtgttcttccatatatctacgcattccaccgctacacatggagttccactgtcctcttctgcactcaagtcgcccggtttccgatgcacttcttcggttaagccgaaggctttcacatcagacctaagcaaccgcctgcgctcgctttacgcccaataaatccggataacgcttgccacctacgtattaccgcggctgctggcacgtagttagccgtgactttctggttggataccgtcactgcatgaacagttactctcacgcacgttcttctccaacaacagagctttacgagccgaaacccttcttcactcacgcggtgttgctccatcaggcttgcgcccattgtggaagattccctactgctgcctcccgtaggagtatggaccgtgtctcagttccattgtggccgatcagtctctcaactcggctatgcatcatcgccttggtaagccgttaccttaccaactagctaatgcaccgcaggtccatcccagagtgatagccaaagccatctttcaaacaaaagccatgtggcttttgttgttatgcggtattagcatctgtttccaaatgttatcccccgctctggggcaggttacctacgtgttactcacccgtccgccactcactggtgatccatcgtcaatccggtgcaagcaccatcaatcagttgggccagtgcgtacgacttgcatgtattaggcacaccgccggcgttcatcctgagccaggatcaaactctcatataaaacatacaagaacttgaatagctctaaattatctttgttattaagcgaattgacttcgcaaatgttttacttcaaatcacatcgtgaatgaagaccctacacatttgattcgtcgaaactttgttcagttttcaaaggtctacccgttggctaatcaagcagccaatcaacacgattattataacatacatcagatcagcttgtcaagaagaaaatttaattaattttgaattccttttgatcgataactcaatcagcaactttattaatatatcatgtcatcaagtggatgtcaatagtttttcagaaaatcatttcaagaattagtgactttacaaccatgtttactcttaataattttaatagatatgatcatttattcacatcttttcgatgacaatagttacattttaccctatatttttattatttgcaataccttttttataaaaattaccagtaagtaaattaattttatcttctggtaattttctactaattaattcaattactaatattcttttgcacttaaaagatcatctttagcgtttttgaaatcacttggcaatggtgccaaaacagtaatattttcacctttaaatggactataaaagctcagccaataacaatggagtgcttgtctagcaattaatcctgattcttcaccatacattttatcgccaattaatgggaaaccaaggctagcaaaatgaacgcgaatttggtgtgtccgccctgtatgcaacctaattttgataaggcttgcttgaacattacattcttggcgccagtattcagttacagatgctttcccttctttccctaccattctttttacaaatgaactgggatcgcgttgaatcggcgcatcaatataaccatgctctgcaggaacttttcctttaattagagcaagatagtttttcttaactaaatgtttttttaactgttcatctaggacagcatgggcaaatcggtgtttaggaaaaacaactaagccgctggtgtcacggtctaaacgtgtcgcaacatgggtaacctgattttcataattttggcgcttatagtagccttttacccgattcaccaaactatcggctaccggaacgttatgagccggaactgtcgctactcctgccggtttattcattattaaaaagtcttgatcttcataaataatatcgataggtgcctcactgatatccacattatcattagcagtttccggagggagaattaatgttactttatcgtggtaattaacagtatcaactgcccacttatctaccccatttatttgcatttttcctccatggtatatggctacttttaataacgaagaagaaaccccatacatttttaatgccgatcgtaatttccgtggtgtgcgatgatcatatatccaattaaattccattaatgcactccaccaataaatgaatcttttactcgattccagaaattattatgccgatattgagcaaaatatattcgttgcttagaaactctataagataattcagttaggtaccgctccttctcacttttaagcatccattgatcacgatcgcatgtaagcacatgcccattttcatcacgcaaacgcaaaattaactcagcatcagcgccaaaaataatcggtgagcctagtgtccggaaaacccggttgttaagtgaagccatttctgctaactgaaagccaacactatttggatcgacaatggcacccccgactgatttattataagcagttgaaccggttggagttgaaatacataaaccatcccccgaaagttttcaaacaaatgattattaatgaacacatcacataccattgttcgtgtaacattccgaattgttgattcattaagtgcaatataattctctatctgcccatcagaataagtagccttcatagcaagtagaggatacgaaactgcctgtccgctatcttttactaaactatcaactaaatcatcaatttcaaaactccgccaatccgtataaaatcctaagtgcccagtatgaattccaacaaagcgaatgttatttaagtctttttgataatgatgaaaagccgataacaaagtaccatctccaccgattgttattacaacttctggatttttttcgacataagttaaacccgcccgtttcatttcagcctttaaaacctttgtcactcgttgagattctgctgtttcattattatatattccaattctcataatttactcctttaactcgtcctcatcaatagaattagttgacctccgcttagaaaacaatgtctgtgcttcctttatttcttctcgaatctctgacatttcattatcaagcttaaatgctgcctctgcggctctttgcaaccttgcagatagctcctcaggaaactcaccttgatatttataatttaaggaatgttctactgttgcccaaaagttcattgcaagggtacgtacttgaatttcagctaatattcttttttctccagtaattaattgcaccggatattcaataacaatatgataggaacgatatccactcggtttaacattggtgacgtaatctcgttcttctaaaatagtcatatcacttcgctgccgtaataagtcaactaccttataaatatcttctacaaattgacacatgattcgtaaaccggcaatatcttgcatatcttgctcaagtcgatcctcttgcacatgtcgtctaatcattttttctttaatactatcaactggctttactcgtccagttacaaattcaatcggagaatgttgcgtttggtcttgaaattgctttcgcatcccccgtaatttgacttttagttcatttacggcttgttgatatggcaataaaaaatgctgccaatcttcaatcataattcagcctcctgttaaatctccgtatattttagcacatttataataataactcttgtaattatcttaaaacgtatctgtcaagttttcataggtagcctttaaatatacagttttagtgggttagtgccttaaaaagttgtcccattggtctacttgtggccgtgttaatcggaattattccttgtactgctccaattgacggctttgtcggtgcctttcttagaaactctccagttcgaatatgcatttcctgtaataggctggtttgagccactcgaggaagaactgttaattgttctaggattatatttaaactagcttgcagttcaccattcattcgggcttcaattaaaccaatcatggctttagccccctgcttagtccatgacttgccctgtttcttcatccggtaagtaaaagcccggtgagaactttcgactgaaccaattaaatgaatatccttaaatccacgcatttgtggtgagaggatataccgccaatttcgctgtagatactttcttaaacgcattaggtcatctgcttgtttttccgttaggttttgtgattcataagtatctaaaattattgttagctctgcttgatcatgatgacgaacggctttaattgctcgcatggctaattcgttgtgccggcctaaagtatgttcaattttctgcaaacaatgatagcggtcgagaaagtattcaccatgtgcactttgaggaactagacttaatagcttagctggttcgtaacctgggccagcgtcactggccaaaaagatcgtttgaccggcaagcttataatggcggtctaaataatcacttagtcgtgcttcaagccgtccttggtgcccaacactgagaaagtcatgccgattaatgatttgattagctactcgctcataaacccgataatggtgcacaagagtcagctgacctgcttcttttttacctttaatcataaaggcatcaccctcaatagttaaatttttaggcatatggcgaggagtagcttggtgttcttttgcttgagtttgtttagctacctgatttcctaactcatgcacggcgtgcattaccgaatcggcagtaattccgctgtcaaatacaaggttcaaaatgtcggcagtattgcgcattgtagttgtttgggcaatcttagccatcatcattaagtagtgtggcgataaacgacgacgtggtttaatttttaattgttggtctaagtaaaattcacgtttctttgtcccagcctgataataccgtcgttgaaaagtcaccgggccaaagataaaattaagcgtccgtggctgtttattaattacttgatagttcgctggagcttgggactttaagcttcgatctaagctttccaaaaagttttgcatgattacttgtcctaactccaataccccttttaaaataatctgttcagcttcaaataaactgcctgatttcaccaaattctgctcgatttctgttaaaatatccatgaggaaagacctgcctttgcttagtattcgacacactaaaggctactggtcttttctttttttgtaaataagtaaattggtctacaaaaaagatttccacgaccagatgaattattcatccaacctatgaaaatcttacactaactcttaaaactaaattctttacaaatagttagatatttgcaaaaataattatgttcacaggattaggattttgagtatacaaatgatcggaggggttaattatgctcgaacttcatctttttgtgaatccattaggaatgcgctgtttacggtgtgaaaaagacgtgttaaaaattgatcgtgatttaaatacaaaaattagttatcagtttgtaccactattcaatatgaaaacgatcgatagcacacttaaatattatcatcttaatccccatgatcttgctgcaagacaacaagtatcaaaaacccttaaccaaataatactagattataaagcagccctcttccaaggacgaaaacgtggacggcattatctcttacaattacaatctgcgcttattaaccaaggcttggattacaacgatgaattaattaataaaattgcacatggttcacaccttgacttagaaatgttttttgaggatcggcaaagtcaacttgctaagcaggctttccgtcaagatcaaaaaatcgcaagtgatctaggcgtatcagaaacggctaccgcagtcgtttttaacaccgaagattctgattacggcctaatgattccaaattttgactataatactttaataaacgcatttaaaagcggaaaattggctcgatctgcatccttagatgaatttgtgaaccaatatcgtccgccaaagctacaaattatacaaaacaataattaataaaaaagagattggaaaagttggcctttcattattgcaccatctatccaacctctttttttattttctgcctagaattgtaatcgttctcttgaaaaagcaagctttactagtttccctagtaattttttgctttcgtccactgcggtttcggccatccgattattaattgtggttaaaaatgcactcacatcctgatgttctgctatttccttatccgtattattttgaacattcattgtttttgccattacttgcaattcaaagttttcttcaatattctgtgcttgacgataattttggtccccaagcgcagcaattgtatgagtgagccaatacatatcgtctattgaatattcagtactagtgtttcgataagggattggtgtatcgtcaatatttgcataaaagggaaccactgcattaaaagtattaggaccaaatgctaaccaatgaacaccagcaatacttgcaggaacattattacgtatttgtagaatatgtaattctaagtttcggtttagtgcaattgacctaaatggagctttatctctttctaaatgatacggatcaaaagctgtcccttgataatgagaactcattaacttcttaatcgtagttacagtaagcttttcttttgcataacagatgaatggaaggttattactttgcgggttagcatttatcgtccctagttgctgctgaacataccatgctcgtgggttgttatagatagtatcagtagcagttgcacttccacaaatatgtcgtaaattgtattcgtcttcgctaggattcaacttattttgatcaatccactgtttcaaatttggtgaactcattgtgttgggactatcaaaatcaaaattagtaatattaaatcgattaggggcaatcacataggcattgtcgggaattttaacagctacccaatgatgaccgccaatcgtttccatataccacacttcattattatcactaaaagctatcgcattagcctcataagtgccatacttttctaataaacttcctagtttcttaacaccatcttgagcactcttaatataaggaaggactaatgttacaaaatcttcttcgccaattcccgataaggtgttataaggatctattgctaatatccgggcattagtagtaatagtttcagtcgcactcatcgcaacattcagaccattgataccgcccgcaccaaaaattccatctttatcgtcagcatcaggcgtagaagtatattttagcttaggaactggtaaatcaattttaaagtcagttgttttgctttgatatttacgtggctgtctttctggttttactaatacaaatctttgaggatcaaatgcattactataatcttcctcacgacaaactatagttgacccgtcaatcgttgcattctttcctgctaaaaacattgtacatgtgtgttgcatactatgatctccttttaaccagctgtagttttaactgtgaatcattaaaccatcttggacgatgaattaaaataagatgattatcccttctacaaattactttaaaggcaattaattcgtttgtatattggttgataataatattgcggattgtttctggaggtaaacaaccagggaataaccaattgcttttgtttaccttcattaataatcttttccattccttatctctccaagaataaaataaagggaatttctctatctctaatattacaccaattcgccagataatcattggaatagacattgccggccagcttgcaatgagatcatggcatactagtggacattcagataaagcatgtccagtaagttttaaagcagttaatgatagttttcttatttctttatttggaaaatgatactgtttcttctttaacatttcaatctgctccattaaaatagtttttttatcatactttaaccggctataggagcaacgccaatatttctgatcaataactaattgcgcccttttcacatcccaaaacaagagaacaaactgccttctaaagatttgcgtaaactgaacgattttcttatttcccaagttacgcaaataaggcgatcctaatatccaccaaaccggaattcttaactgacgatacccttcattacgtgctaataacttttcaaggcttaagggactacattgaaattcaactgctacagtttgtccattaatttctaaaagaatatccggtcgttgagtaattgttggaaaatagacttctaattgcggattccaatgatgcttttgtgcccattgataaatctgttctttcccttttaaatgttctaatgtttcaccctcgctaaagccacagtcatttcccttcttatgggcataatgagtaatcttatgctttcctcgccgcaagatcactccctgcccgcatcctggacaataatatgccatatcgctttttgcgttttcagccaacactaattgatcgttatgaactgcaattaacatttaatccccctatatatttatatacggaaattactcaattttgcacgaaaaaaaactacgttgagtatgaactcaaacgcagcttattcaaaatagtgtcgaattaaatgcaaggcagatactgacattattttctttccatgttcacttaaaaaatcaaccgttgttgccgtgggatttccatattcataagcaagagcaagctgatctttaacatcattactgttcaaaatagaatcagaataagcaattgctaaataatacaaatcattgtacttatataaatatgatgaaacatcatcattatcggcaattttcgcaaaatcaattaaatcttcaaaagaatcaaacgtaattacttgccagttcgtgtgctgaatctcattatcttctgaatcattaatcgctgttttcctttgatcttgatcttgactatttttttgaatcaaatgttgcttaatatatttggacacctggtcattaatcggtccatgctgttcattcccagcaaaattagaatcatttttactaataaataattctaagccattattagtgggcatcacctgaaaagtaaccgcatcgttattttggaattggcgatcagtatctacttctttcaggatactataaaagaaatcctctatttgctgatggtcacctagcaaatctagaatggtgataccccgagcagataaatcatcattatctaccaaaacgcgaatagtattttcattaatgcgttccatctccattgagcagcacctccttttaccaaaactagatgttacttctattgtaaggattttcgcttaaaagtaaagttactcggttaaaagaataaaaaaaggaaagcataatactttccatattctatcagttaaatcatatttgctttttcttgagcctctactagttctagttcacgaacctttcgtggtaagaagcgacggatttcgtcttcgttgtaacctacttgaagccgtttatcatcaataataatcggacgtcgtaacaatcctggatttttactaattaacttaaacagatccttcatcgacaaatcattgagatctatgctcaacttctggtaagctttagaccgctttgaaataatgtcttcagtaccatcttcagtcatccgtaaaatattcttgatttcatttaaagacaatggttcagaaaaaatattccgttccttaaaagcaatatcatgttcttttagccaggcacgtgctttacgacaagacgtgcaacttggagacgtatatagtgtaaccatttcgtttagtggcctcctttattaagttaaactagaacattcattaatacattgtttattatactccctattcaattaatattaaagcgatataacaaaaattattgactttttgtaagttctattgatattagattttccatttatgtcttatcaaaaataaagtagataaaatttacaatttaattattttacattaagttgtactataataagtatgactactaacttctgaggagggattaatatgttaacaaaaattagcttaacatttggttcacgacaaattttacaatcaatcattgataaatatcccgaacgtcattttaaattaatgcaggcaactactcatacaagaaaattagcattatttgatctttctggaaaagatactatttttcagtcaccagtaaaattaacaactcttgattcaacgctagatgctcaattaaatggaatgttttactaccaatcatttcaagtaaacggtgaccgtcaaaagctactttataatacacttcaaaaggtattaactgaaccagctaatatgaacggtggttatatgcttagcgttgataataaagcggaagctactactttagttttactaactgcttgggccgattttgaagccttaactgcatggaaggaaagcgatactttcacatccttaaagaactttactagtatggggtcagataatagttattatgatgagatttacaaacccattttttaataagtagataacgtagggtatttgccaatggtatttaactgatacctacaacaggactatgaattatcatttttggtaattcatagtcctgttttttagggtatacactttctggtatggatagagattccatgccaaattttttatcccgaaatgtcaatttaagttagaaagaaagtagttgctcatcagtgacgtaggacatgaatacctcatatggagttcgatagcctagtgatttgcggggcaggttatttcgcttactcatcagttgggtcaccaattcatcgggaagattgcggaaatttagccgttttgttaagccgtcccggcgtaaaagaccgttgttgttttcgttcagccctcgttgattgggagcaccaacctcggcaaagtaagtgtgaaggtcaaattgattggcaatctcgcgccagccggcgaattcttttccgttgtcaaaggtaatcgatttgaagaagtgccacggaaatttacgaagccactgacctaagtgttggttaatcgcatcagccgtcttttcgtgcacattgagtacaatttcgaccttcgattgcgttcggtcagggtcattaccgccccttggtgctttttaccttggacggtatcagcttcaaggtgcccaaattcagtggcatagtgcggaaagtccttggcacgctcgtgaatacttcgccccaattggccagccttcccgcggcgctcgacatagccattcgggtgccgcttacctcgcatcggcaaggaacggacatcgaagccgaactggccacgttcaaacatccggtaaagagttcgcaggctacaactaattgggcgctcagcgcgcccaataatggtatcaggcgtccacccctgggcaattttgtcgttgatataagtgagttcagccagtgacaactgagtacgttttcggccacaacgttgcttattgcgcatatagtgatcttgataatcagcaattgaggcaccggtttccaggtaacgataaacgcgataaacggtttcggcgctacggttgatcatttgggccactcggtacgctctaagcttttgcacgaaagaatgggcgatgattgtcagctcgtttgtggtaagatgggtgtaagtcatttgtggtttcctttcttttgtttaggggtattcaaaagtctaccacaaatggcttttctatttttctaacttaattttacaaacggcgaatggaataacttcttcaatctgtggtaaaccatctaaaaaagtggtccgctgaccagattgctttgctttccggtgacgcaccacttgctttattttcttttcagtcacttccgtgactgaaatatcaggatcttgaagttgatccatttcttgctcactaaataaggattgttgtccatcaacgacgggctccattacttcagtctttttcccaaatatttggttcttttgaagtttgataatagctattaattgagcaatcttttcattgaccatagctaattgttgtttaagttctttgatttgttcttccgctgtttgcttcatggtacgtcacctcctttgaattattctttggtaattatatcaaagaattcttcttttaaatagaggtaactcaataaaaacttcccggtcgaacagcttgaattttacgaattggtaatgggttcagtccttgcaataaccagtcgagctgttgatcagataattctttggcttcattactgtttctcggccaactaaggtggccattttcaaaccgtttatagagcataataaagccctcgccatcccaaaacaatcctttaaagcgattattacgtccgccgcaaaataagaaaagcgaattattatataattctaatccatagttctcagcgattaccattgcgagcccatcaataccttttcgcatgtctgtttttccacagactaaatagatataatctgggtcatgccaattaacgagcataacgaataaccactttaacgatatccgaagctaaaacagaattagtccccttgaaaatcgttaattcgacttcattcacattaatttttacggcagggcgtgccgtaaaagaatgcttttgtaaattacttggcttgtttttgaaaactggggtaataatttcattttgttctgtcataaataaaaaatctccttactgatgatagtctcagtatagaagatccggggtagctagagctagacgtactgttattgactgcttacgatattgtagagcctttttaattcgtattttattaactgtttaccttttactaacaaaaaaacttcccacctatccgtagaaagtttttatttatcattaattatacggtccgtacgagactcgaactcgtgatctcatccgtgacagggatgcgtcctaaaccaactagaccaacggaccaaaattgcgggggctgggtttgaaccaacgacctccgggttatgagcccgacgagctaccagactgctctaccccgcgataataaagatgacccgtgcgggatttgaacccacgataccagcgtgaaaggctggtgtcttaaccacttgactaacgggtcattacggagaaggagggattcgaaccctcgcaccgcttgcgcgatctacacccttagcaggggcgcctcttcagccacttgagtacttctccaatgggcctaaatggacttgaaccatcgacctcacgcttatcaggcgtgcgctctaaaccagctgagctataggcccatatctaagcgggtaacgagaatcgaactcgcgacaacagcttggaaggctgtggttttaccactaaactatacccgcataatattaagttaatggcgcgggacggaatcgaaccgccgacacacggagcttcaatccgttgctctaccaactgagctaccgagccaaatataaacggtccgtacgagactcgaactcgtgatctcatccgtgacagggatgcgtcctaaaccaactagaccaacggaccaaaattgcggggctgggtttgaaccaacgacctccgggttatgagcccgacgagctaccagactgctctaccccgcgataatataaggaggatgagggattcgaaccctcgcgtcgctctcacggcctagcggttttcaagaccgcccccttcagccacttgggtaatcctccataatgaactaataagattaaacaataatgattcatcaaagctaatctctgatggaccttgtaggactcgaacctacgaccgggcggttatgagccgcttgctctaaccaactgagctaaaggtccaaaacagccagccaatcgcggcgggggggatcgaaccctcgacctcccgggtatgaaccggacgctctagccagctgagctacaccgcgaaaaaactaataatatattaattttataaatcgggaaaacaggattcgaacctgcgaccccctggtcccaaaccaggtgctctaccaagctgagctatttcccgaaaaaatgcacccagaaggagtcgaaccttcaaccttctgattcgtagtcagacactctatccaattgcgctatgggtgcataataagtgccgaggaccgggatcgaaccggtacggttatcactaaccgcaggattttaagtcctgtgcgtctgccaattccgccaccccggcattatagaactggcaaagcggaagacgggattcgaacccgcgacccccaccatggcaaggtgatgttctaccactgaactacttccgcatatgaaagtgccgactagaggattcgaacctccgaccccctgtttacaagacaggtgctctgccaactgagctaagtcggcaattgacactttgtttttttattatcagataaaatttctgataatgagccgtgacgggcttgaaccgtcgaccctctgattaaaagtcagatgctctaccaactgagctaacggctcatgagcttaatcgctcaatggaggatacagggctcgaacctgtgacctcctgcttgtaaggcagatgctctcccaactgagctaatcctccataagcgtggcaacgtcctatcctcgcagggagcgatcccccaactactttcggcgtgttgaagcttaacttctgtgttcggcatgggtacaggtgtatccttcaagccatcatcaccacactctttgtcccttcggacgagagcttgtgctctcaaaactaaatcctatctattctcttccaataaaccttaccgctccttggttaagtcctcgaccgattagtaatggtccgcttcatgcctcacggcacttccacttccatcctatctacctcatcatctctgaggggtcttactttcccgaaggaaatgggaaatctcatctcgaggcgagtttcacacttagatgctttcagcgtttatctcgtccatacatagctacccagcggtgctcctggcggaacaactggtacaccagcggtatgtccatcccggtcctctcgtactaaggacaggtcctctcaaatttcctacgcccgcgacggatagggaccgaactgtctcacgacgttctgaacccagctcgcgtaccgctttaatgggcgaacagcccaacccttgggaccgactacagccccaggatgcgatgagccgacatcgaggtgccaaacctccccgtcgatgtggactcttgggggagataagcctgttatccccagggtagcttttatccgttgagcgatggcccttccatacggaaccaccggatcactaagcccgactttcgtccctgctcgacctgtctgtctcgcagtcaagctcgcttgtgcctttacactctgcgcatgatttccaaccatactgagcgaacctttgggcgcctccgttaccttttaggaggcgaccgccccagtcaaactgcccacctgacactgtctcccagcacgttcagtgctgcgggttagagtggtcatattgcaagggtagtatcccaccagcgcctctgtcgaaactagcgtcccgacttctacggctcctacctatcctgtacaagcagtacaaacactcaatatcaagctacagtaaagctccatggggtctttccgtcctgtcgcgggtaccctgcatcttcacagggatttcaatttcaccgagtctctcgttgagacagcgcccagatcgttacgcctttcgtgcgggtcggaacttacccgacaaggaatttcgctaccttaggaccgttatagttacggccgccgtttactggggcttcaattctgagcttcgccgaagctaacccatccttttaaccttccagcaccgggcaggcgtcagcccctatacttcatcttacgattttgcagaaacctgtgtttttgataaacagtcgcctgggcctattcactgcggctggccttgcggccagcaccccttctcccgaagttacggggtcattttgccgagttccttaacgagagttctctcgctcaccttaggattctctcctcgactacctgtgtcggtttgcggtacgggcagttaactactccttagaagcttttctcggcagtgtgacatcggcaacttcgctactttaatttcgctccccatcacagcttgtcaacacggatgtaaacatttgactcacatcctgacttactgcttggccgtactcttccagtcgtacggtttgcttagcctcctgcgtccctccatcgtcaaacgcagttaactggtacaggaatctcaacctgttatccatcgcctacgcctctcggcctcggcttaggtcccgacttaccctgggaggacgagccttccccaggaaaccttagtcattcggtggacaggattctcacctgtctttcgctactcataccggcattctcacttctaagcgctccaccagtcctcacggtctgacttcgccgcccttagaacgctctcctatcacgtgcacatagtgcacatccacagtttcggtaatatgcttagccccggtacattttcggcgcaggatcactcgactagtgagctattacgcactctttaaatggtggctgcttctaagccaacatcctagttgtctatgcaactccacatccttttccacttagcatatatttagggaccttaactggtgatctgggctgttcccctttcgacggtggatcttatcactcatcgtctgactcctgagtataaatcgatggcattcggagtttatctgaagttggtaacccatgacggccccttgtccaaacagtagctctacctccacgattctttacctcaaggctccccctaaagagatttcggagagaaccagctatctccaagttcgtttggaatttcaccgctacccacacctcatcccagccattttcaactgacacgggttcggtcctccagtgcgctttaccgcaccttcaacctggacatgggtaggtcacctggtttcgggtctacaactacatacttttacgcccatttaagactcgctttcgctacggctccggtttttccaccttaaccttgcatgcaatcgtaactcgccggttcattctgcaagaggcacgccgtcacccattaacgggctccgacagcttgtaggcacatggtttcaggaactatttcactccccttccggggtgcttttcacctttccctcacggtactggttcactatcggtcactagggagtatttagccttgcgagatggtcctcgcgggttccgacggggtttcacgtgtcccgccgtactcaggatcctgaacagagagtgtgacgtttcgtctacggggctttcaccctctatggcacagcttcccaactgttgcgactacgtcgcactttggtaactctaatgttcagtcctacaaccccaacaagcaagcttgttggtttgggctcttcccttttcgctcgccgctactcagggaatcgatgtttctttctcttcctgcagctactaagatgtttcagttcactgcgtctacctcttgctagctatgtattcactagtcaagtaatcagcgactaagctgattgggttgccccattcggaaatctccggatcaaagcgtacttaccgctccccgaagcatatcggtgttagtcccgtccttcatcggctcctagtaccaaggcattcaccatgcgcccttcataacttaacctaaacaatcaaagattgtctgattaattgagttagcgattataattcgttaattaaaactcaaataacgcggtgttctcggtttattgttttgttaataaagaaattagatagtatttagttttcaaagtacaaactctatcaaccttatggttgataatggagaataacggaatcgaaccgatgacctcctgcttgcaaagcaggtgctctcccagctgagctaattccccatatgggcctaaatggacttgaaccatcgacctcacgcttatcaggcgtgcgctctaaaccagctgagctataggcccaaataagcgtcttataagttaaagttttaagaggtaaacctctcaaaactaaacaaagtttctccgatgtgtaggttccgttttattccttagaaaggaggtgatccagccgcaggttctcctacggctaccttgttacgacttcaccccagtcatctgtcccgccttaggcggctccctccataaaggttaggccaccgactttgggcgttacaaactcccatggtgtgacgggcggtgtgtacaaggcccgggaacgtattcaccgcggcatgctgatccgcgattactagcgattccgacttcgtgtaggcgagttgcagcctacagtccgaactgagaacggctttaagagattagcttactctcgcgagtttgcgactcgttgtaccgtccattgtagcacgtgtgtagcccaggtcataaggggcatgatgatctgacgtcgtccccaccttcctccggtttgtcaccggcagtctcactagagtgcccaacttaatgctggcaactagtaacaagggttgcgctcgttgcgggacttaacccaacatctcacgacacgagctgacgacgaccatgcaccacctgtcattgcgtccccgaagggaacgccttatctctaaggttagcgcaagatgtcaagacctggtaaggttcttcgcgtagcttcgaattaaaccacatgctccaccgcttgtgcgggccccgtcaattcctttgagtttcaaccttgcggtcgtactccccaggcggagtgcttaatgcgttagctccggcactgaagggcggaaaccctccaacacctagcactcatcgtttacggcatggactaccagggtatctaatcctgttcgctacccatgctttcgagcctcagcgtcagttgcagaccagacagccgccttcgccactggtgttcttccatatatctacgcattccaccgctacacatggagttccactgtcctcttctgcactcaagtcgcccggtttccgatgcacttcttcggttaagccgaaggctttcacatcagacctaagcaaccgcctgcgctcgctttacgcccaataaatccggataacgcttgccacctacgtattaccgcggctgctggcacgtagttagccgtgactttctggttggataccgtcactgcataaacagttactctcacgcacgttcttctccaacaacagagctttacgagccgaaacccttcttcactcacgcggtgttgctccatcaggcttgcgcccattgtggaagattccctactgctgcctcccgtaggagtatggaccgtgtctcagttccattgtggccgatcagtctctcaactcggctatgcatcatcgccttggtaagccgttaccttaccaactagctaatgcaccgcaggtccatcccagagtgatagccaaagccatctttcaaacaaaagccatgtggcttttgttgttatgcggtattagcatctgtttccaaatgttatccccgctccggggcaggttacctacgtgttactcacccgtccgccactcactggtaatccatcgtcaatcaggcgcaagcaccatcaatcagttgggccagtgcgtacgacttgcatgtattaggcacaccgccggcgttcatcctgagccaggatcaaactctcatataaaatatataagaacttgaatagctctcaattatctttgttattaagcgaattgacttcgcaaatgttttacttcaaatcacatcgtgattgaagaccctacacatttgattcgtcgaaactttgttcagttttcaaaggtctacccgttggctaatcaagcagccaatcaacatttttattatagcatatatcagattagcttgtcaagaagaaattttaaattatttttgattttcttttgatcgataactcaatcagcaactttattaatatatcatgttgtcaaatctatgtcaacaattatttttaacttttttgtcaaaccatctcaacagcgcttaactgttttgacaacgataattactatacatgggtttttattccccgtcaactgttttttctaaaaaaattaaaaagtattctcaaggtcatataaacagttaaaaacttcaatagcaactaggtcaatatcatcaaagcgaaaacgttcataagggcgatatcgaacgaagataaattcttccctactatggatataagttacatcacataatggaataccaaatttttcaaatgttcgtttctgtcgatctcttgaatcatcgttttgcatcgcaatcaaacgtttaataatcactaataattctgattctttcacaatgataatcctccttcatacaaataaaggatcgtgccttcacacaatccctttttctatctttttactttatcaggttttataaatacagctacaattccggcgaacattccgaagtaatatgtgagtagtcgccataagatcattgctaaaatcaattttgtatttgagtgaataaaacttgcaaagagaacggaaaaactatactcggctccccccgcccctcctggaattggaaaaagcgaaataatcataaaaattaacacgtgcaagctgagcaccatcacaaaattaatgtggtcaattccaagtgcaagcataataaagtatgggattgcatagtaaaagaataattgaaaaatagttactacgcaaaccttaagcagcttcttataatcttgcttcattcggagactctcttggtaaaaagtatccactttttcatttaagacaactttcatgtgctcatatcggttagccttcataaaaatggcagctggtttgataacgaggttcattagtctcttagtaaaactataccagtacatcaccatcagtaatccgacaattaccgctaaatgaatcaaaaagccaaatattactaataatgaaagagcatggagtttctccgcaataaaatgaaagccaattaacaagctgattaagaagttaacaacaatcattgcctgaaatacaacaaacttcattaaaagaactgaacttgctaatccccatcaacacctgattgaatcattgcaactaattgcgctggttgtcctcctgttgagaatggagtaattccattaaatagttgttcgattaatggtaatcgtaatgcatccttccaggtaaaaccatcgtgacgatcattcataaaaatctttacgacaaccgcctccaaacctaaatataaacaaatacagccaagtgcaacgagcatccatccccaattaatggcagaaacatcctgtaacaataggtggatgtttgagttacgtaatgagtagccgagaattccaactccaataattagcattatgcttaatactaaccaatttcgcctgctcactaagcatccccctttcgcgcttgctcctgataaaacttagtccaaacatctgctaagtgttcttttgagtattccttagcagctcgctgggcctgagtttgccaatgtgccagtcgtgcaggatcattgcgtaataatgtcaacttcatttgcatctcattgacatctttagcaggctcataatccccttcaacaatagaatgataaaggtcaagatcgcgtaacattactggtgtcccacagctaaaagcttccaagacagacattggaaatagttcattatatgaaggtaaaagaaataggtcggcaagattattcagttcagcaatcttatcccgtgaaacgattcccgtaaaatgtaaattagctggtggattatctaccaccttttttaattcactataaccatctgttaaacggccaaaagaaaatccgccagcccaaaaaaactcaacgtccggattttggcgagcaagacgaataaagtctggaactccttttcgttcttgaacctggccgcttcctaataccacaaacttatcggcagcaatcccatatttttttcggagagcagttcgcttaacagccgaatatggatggaaacgatcattatcaacaaagttaggaatataggtaatctttttttcaggaatcccatatgctactaactgcttgataaaagagggattcacaactactaactgatccattcgtttataaaaggcaataatgtaatgataaaaaagcccgcgaaacggttgcgggattgtaagacttccttctaacgtctcgggaagaaaatgcacatagccaatctttcgaccccgcttttttgaaaaagttgacaggtaaaaaagagggtcgattgtatgataatgactgatctgactcttcccataacggttgatttcaatttcaaatttgtcactgcactggttgcgcaacaagttaattaattcaagataggcacttcctactccttgtcccgcaaccttatctgcagatgaaaacattgttattttaatcatcattagctccttgggcggtgaaaaagacgatgtgatttttcagcttgattaagttcatcatggacagccatatctttttgacaatcctggtagaactgaacaaccctttcaacaaagacctctgctgagatctcatgcagcttttgttgtcgtctcacccttgattctgagttttttggttggttaaggtaaaataggacaccattaaccaagtcagcccgtttttgaaaactaatgccaatcgctgggtcatcaatcaattggtcagtatattcactacgcataaccacaattggcaaatccgaggcaagggcttcatcataagtcagtccttgtgattcagaatcggaggctgaaacaaaaacatctgccatttggtaataatggtaaacttcatcatttgatatctcaccagcgaaactaacattgtcattaagctgcatttcacgaacttgacgctccagagtatgtcttgcgggaccatccccaacaatcagcagctgtgcatcaggcttgtgagcaagaatatctggcattgcttctatcagtgagtggatattcttttcatatgctaaacgactaagcgaaagtaaaactggggtctcttcactgtagcctaactttgcccttaaattagctatttcttctgctgaatctcgtttactatatacccgtaaattaatcccagtcggaataacacgaattggtgattcaacatgataactggttaaagtatccaaaacacggtcacttggagcaataatcccagaaatattttttaaataaagatgagcaagccgggcaacatcattcggcttaagaatatggccattcgcaatatagtggagataatcctgatacatcgtatggtaagtatggagacaagggatatgcaaatgcttggcaaccgtcttccccataactccaagcgcaaattcagtttgattatgaactatatctaattggaactttttagcaagcttgatggctcgaaatacgccacgcaccgcaattcgacgatcagaaaacgaaacaaagggaatgcttgcaaagcggtatatcccattttcaacatcatcatgtttagccttaggatcagttgtcgtaaaaatatatacatgatgtccctgagcaatcaattcatcacgaagcgtcttaatcgaagtcgccacgccactcacctgagggaaatatgtatctgtaaaaataccaatattcaacctaactgctcctttttcatcataagttttctagataataattagtcataactgctattatactaaagcattcactgaaccgcaaaacggatttaagatattttaaatcttcctcctaatagtaacaagactcgggaagcctgattaagatttctttacaaaatcttttaataatgagaataaaaaataaccctcttgaaatggtgaacaatcaagaaagttaatttcatttatcaaagttttacctgtggaacatacttttccactaattcttggaccgccacggcagtttcagcatgaatcgctcgatgaactaatggttgtaatttgcgcgtattcaactggttaattaaagagcgaacacgtaaaatctgactactgctcattgaaaattcatcaagccccatcgccattaatagaggaaccgcataaggattattagccatctctccacacattccgacccacttgccttcagcatgcgcagcttcaatcacttgccgcaccatccgtaaaactgctgggtgaagttcttgatataggtatgctacttgctgatttccgcgatcaacagcaaataggtactgaataaggtcattactgccaatgctgaaaaaatcaacatattttgcaaaatgttcagccataactgcaactgctggaatctctagcatcatgccaacttcaatatttttagcaacttgaatacctgcttgctcaagcttttctttttcatcgtcaagaattgctcgtgccgcttggaactcttcaattgttgcaatcatcggaaacataatggctaaccgtccataaacggatgcacgaagaagggcgcgcaattgaggacgtaatatttctgggcgtgccaatccaatcctaatggcacgaaaacctaggtaaggattgtcctcatgaggaagagcaaccatccccagctttttatcgccgccaatatcaagcgttcgcgcgactacccgttgtccgttcatcgctgaaacaaatcttttgtaagcattaaattgttgctcttctgttggcaattcatccttactcatatagaggaattctgttctcaaaagaccaattccctcggcaccatcctcttgagcatcaataacgtcagcaaatgttccgacattagctcccacttcaaatcggcgcccatcagcactcacagtttgcttatcttttaacgctccccacttttgctgctcctggataaatttaccggctaacaaacggtaatgctcaacctcttccttcgttggattgacaatcactttgccatgaatcccatcaacaatcagtaagtcgccatcatgaatgatcgcagtagcatccttgacaccaacgacagctggtaacgaaagagtcttactcataatcgtaaaatgagaagtccgccccccgttagttgtaacaattcctgcaacatatcgtttatcaaattgagcggtatcagtaggcgtaatattattagcaacaaagatcgcgcggtggtctaaaagtcctgggtctggtaaaggaacattcaataggtgactcaaaactcgtttggtcacatcacgcaaggcggttgcccgcgcatataaatattcattatcgttcttgcgctcaaaaatacttaaataataatcttcaacgcgtttaacagcccactcggcggtatcatgatggctattaatacggtcaataatcttcttttgtaaagtcggatcgtctaaaatcgcaatttgggtatcaataatcgtcactgcccgttgacctaacagctcatgggcacgcttagataaatgctgaaattcggtcttgcttaacgcaaaagaatcatgaagccgggcgacctcatgattctcatcagctgtatgctgtttttttatagatagatctgactctactaacaggtgtgccggagcaatcgtaataccactactagcggcaagtccggttagtagtatagacattagtcagtcaatccttccttcttcatagtttcagcaacggtgtccaaagcttctttttcgtcgtcaccattagcagtaatagtaaccttggcgttttgaccaacaccaagggacattacacccatgattgacttcaagtttacactcttaccttcgtatgaaagagtaatgtcagatgaaaactttgaagcagcttgtaccaaaatagtagctggacgagcatgaataccagtttcagaagtaattgtaaattcacgtttttccatattaatcagtctccttcgagcagatataattaatttattatcagtagcttgaccactgatacacctcgataattacattttagcaattgtaagcgttaaatacaaggctacatcttgcgatttatcgctctcttaattgataaataactttaccgcctcgctgcgcttcgcctttaatttgcgaacgatacgcatacgagtgaaaaattggttgaaattgctgaaaattctcaggggtaattacaaaatgatcaatctttttatttcgcaagtcatccaacaattgctcaaaattttcttctgccattcaatcacctcaacataaaattttattttcttattatacacgaaattactttcatctttctattttagcattcatggctaaagagtgctaaaatcaaagtaagctgttttcggtattcctaagtaacttagctatgcggaaaatcgctctttatttaagaaaatatttaagttttatggcttgctttgcgataaaaagtaagtataatattaatcaatggtcaagaaaggtcaaaaaattcttgatggaactatttaggaggtattaaatttagatgcaatgtcaatactgtcatcaaaatccagccacgattcatcttcaaatgaattttaatggacaacggattcaaatagacctctgccaaaattgttatcaaaaattacaaaatctacaaacagatatgatgaatggaggtaacggaatgaataatttcggttttggaagcctcgaagacttcatgaacgcaatgaacaatatgcaaagccaagctgctggtgctaatggtcaaaacatgaacggccaatcccaacgacaaggtggcggacgaaatggaaaaggaatccttggtcaatatgggatcaaccttactgatctcgctcgccaaggtaaaattgacccagtcatcgggcgcgacaacgaaattaaacgagtaatcgaaattttaaaccgtcggaccaagaataacccagtcttgattggtgaagctggggttggtaagaccgcggttgttgaaggcttagctcaagcaatcgttagtggccaagttcccgaaaagcttgctaacaaggaaattatccggctcgatgttgtttccttagttcaaggaacaggaattcggggccaatttgaaaaacgaatgcaacaattaatggaagaagttcgtaagaataaaaacatcatcctctttattgacgaaatccacgaaatcatgggtgcgggaaatgctgaaggcggaatggacgctggaaatgttcttaagcccgcccttgcccgtggtgacttccaattagttggtgccactactcttaatgaatatcgaaagatcgaaaaggatgcagctcttgcacgacggttccaaccagttgaagttgatgaaccatccgttgaagaaacaatccgcatcttaaacggaatcaaaaatcgttatcaagattaccaccatgttaaatacacagatgacgcaattgtagcagctgctaaactttctgaccgctacattcaagatcgttacttacctgacaaagctatcgacttacttgatgaagcgggatcaaagaagaacttaacgcttaaaaatgtggatccaaacgcaatcgaaaatgaaatccacacagctgaagcacacaagcaacaagcagctgataaccaagactatgaaaaagcagctttctaccgcgatcaagtcgctaaacttgaaaaggcaaagaaagaagctgaagaaaaccatactgaagattctgcaactgttaccgttaaggatatgcagagaatcgttgaagaacggacaaatattccagttggtgacctgcaaaagcaagaagaaaatcaacttcgcgaccttgataagaagcttgatgaacatgttattggtcaaacccaagcagtggataaggttgcccgtgccattcgtcgtaaccggattggtttgaacaagtctgggcgcccaatcggtagtttcctctttgttggtcctacaggggttggtaagactgaaactgctaagcaacttgcccttcaattatttggttctaaagatgccatgattcggttcgatatgtccgaatacatggacaagacctctacttctaaattaatcggggctgctcctggttatgttggttatgaagaagctggtcagttgactgaacaagtacggcggcacccttacagcttgatcttacttgatgaagttgaaaaggcgcacccagatgttatgcacatgttcttacaaattcttgatgatggtcgtttaactgattctcaaggacgcactgttagcttcaaggatacaatcattatcatgacatctaatgccggaactggtgattcagaagcaagtgttggtttcggtgctgagtctaatggtagtacccactccatcattgacaagttgacaaactacttcaagccagaattcttaaaccggtttgatgacattgttcaattcaatgccctctctaaagatgacttgatgaagatcgttaacttaatgattgatgatgttaataacatgcttgctgataagaacttgcacatcgaagtcactaacaatgttgaagaaaaattagttgacatgggctttgatccaaagatgggtgctcgtcctcttcgccgggtaatccaagaacaaatcgaagaccggattgctgattacgttcttgatcacagtgacgctcataaattagttgctaaacttgatgataatggggacattgttgtcgaagaaactgaagaagtaccaacaattgctaaaaaataattgagtataaaaaacgaggctgaattttttagcctcgttttttatatgctcaatttacttccaaacgacggcggacctccaatactggaagagcaaccattggaacaataataatcgccaatatcaattctgcaagtccattagtcgccatgactgtttctaaagcaattaataaatgattaacatttaccccataagtttgcgcaactgctggagtacgataaaatagataaataaagcctaatactaagccagtattagtaagggctcctactatcgcagcacttactgcggcaatatattttactttgaacaaacgacacataaggataaaagtatagccagctaaaatcccaatcataatgcgcgggacaacggaaacaagcgggttaacaaaaactaagggagcaagcggactacttggtgcaacaaatgctcgcacccaagtcaaaagcccccaaataccaccaataattgcgccatcaacgggccccaacacgattgccgcaataatgactgttacatgaagggttgtaatactaagcggccctagcggaatgttgccaaaaaatgtgacaaaatcttgtaagagaataattgcgataaagattgctaatgtcgtattgtgcctaatttgttggtgccgtgtttttgccatttttcttctcctaaataaatttgaataggcttattgtaataaaaaaatcacctattcgcaattctcaagagaaatatggtcgttccttatcgtgtcagctactaaaaagcgctataataatagagaattaaggttacggagtgttaataatgattgacaagtttaaaacaggaaatcctatctgggtttactataatgatatcgattcaggagcaaaccttaccgtcccgcaattattacgcggattcatcggtcaagaataccaaattgaacaaaaacaatttcctaattaccgatacgtaaaaactgaaggtgaaactaagggaacatttgatatgcggcaacgaattgtgcaccttttttatcggaaacaaaattggggagaggttcaatcgattgaaatgtatctccacctcgatgcccctacacaggtatttgacacagctggtggaatgccagtcggtgccccccttcctgctgatattacagttaagtcttttcaccgggttgcaactaagaatggtcagttttggtatgaaatcggcgctgatcaatggattaaatacgatcaaatgcacgttgttgacaatccattcaaccaggatatccggaaagaaaaatcaaaacttattaataatttaacagtgattcccttgaagaatgttcaggccaaagttgattatctccataataagtcaatcaatgtttacgatgcgccttatggaaataaagtggcagagattccaaacggcgaaacaattaccctaattggaaaattaaacgataatgatgagattacctggtaccaagtgggccgcaaaaaatatattactagcaactacattcaaattgaatatccggaagatgatgaataaaaaaagcgagaggttgagaaaaagcaaaagttttttctcaacctctcctatttttacaaacaatagcaaaataacatggaactagcttcgcatcaccacaaggctcaaggctcaagactaatgctcactcacttttattaatcccgccgtaattgaattttattattaaagaatcgcgctaaagcataaacaatgattaagtaaataactaagattacccaaccagtaacgtttgagattatgattgatttaaagacaccactagcagaaagtgcaggaattaagccaaccagtgaataagctaacatcatcaataaaactaggcacgccattggaagcccaattcctacaatccatttccaccgacgatttaataaggcaaaaccattaccaattgccatcatcgttaaagaaaaaccgaagtaccataaaagactatgccaagcagaaacaagatcaaacggtgtattcattaagcccaccagttgtgcgataaaccaaactactaatgtcatcaggaaaagagataaaatccgcccttgccatagtgttttacgagaaataccgttttgaattgcccatttaaagtcagtataaggagttacaaggaaaatcgccattaaaagcacgcttaagattgatgaagcaatgcttggaagggcttggaggctaaccaaaaaagattcaaggttgtgtgaaataattaatccaagcaggtaggttattaatgcaattcccagcccccaacctaaggcaattcctgtagcgtgacctgcttgttgaaacatggttgaaataacaaggtttctcttttgattttccattagtattctcccccattcgttaagtaaatgaataaatgctgcaaatcataatgaccaatcttaacttgatcaggaatcacacgctgttcatctaagcgatcaagtaagtaggcagtcttaatattacccatcatctccgttttaagaatttttaagcctgcagtatactcatcaaccattttttccggaccactaattgcataagccttggctaataaactttctgtatcttcattaataatgatgtggtgttgatccatgattagaacatgttcgactaattgttgaatttcttcaattaagtgagttgataagacgaaggttcgcggccgctcttgataagtcttaactaattctttatagaagctatcacggtgattagcatctaaacctaaaatcggttcatctaataaaacgtaatcggcattgactgctaaagcaacgatcagcttggaggctgtccgttgcccagtcgataagttagtaattttcatccggtcattcaagccaaaaaccttgaggagacggtttgctagatcatagtcaaaattattataagcgacatcggccaagtcaaaggtttgacttatcttcatgtgacgcggataaagattaacttcactcatcaaaaagatcttgctgaggaggtcatcattgttattaacgtcttcattaccaatttttacttccccgctcgttggaaaaatccggttgctcataatattaagaagagtcgtctttccagccccattccggccaaggagaccataaattttagcaggttctaggataaatgaaatattatccaatactgtttggcgacggtactttttgacaatatttttaactattaattgatccatcattctcacctcgttcgattaagtctaataaatgctgcttggtaatcccgagcttacctgcttcaactagcaaactctttacatagtcgttataaaaactttctttacgttgttccataattttttgttgtgcacctttttttacaaacatccctagtccacgtcgcttttctaagaggtctttattaaccaaaatattcatccccttaagaactgtcgcaggattgatatgcaattgctgagaaagctgggtcgttgacggtacctgcgaaccttcatcaaagcccccagagaaaatcatctcttcaagctggtcagcaatttgctgataaagcggcatcgagtcattaaagtcgaaattcataagtgcacctccttttcgtttaacacttcattacttatgtaactaagtatatatgtaaatgagagatttggcaagagggtaaaagaaaaaacttcctgctcggctgaggaggaagtttttaatattattgatctatccatgatttctgataactgtttgtggatccaaccattcaccatggcctgttgcttgactaggatcattccaacttggaacaaaggaattctttaaatcgatgccatagtttggactagtattaattcctaagtgaagatgatcaaggtcacgataaccaattacttgaccggcataaacgatatcgtttggtttaacagtgatcttatcacggttactaaatgcttcctggtaaacatataagtattttccgtcccaaacagttgtaaaccaccatagaactttaccatcatcatcttttaccgtatttacatctaatactcgcccaccatgaactgcatgaacttctgaacctggatgatcttgagtcccaaagtctaggccatcatggaagccattcttacgaatattgctggtataaccaaatttctgtccctgatagtgccaaccttcaccagaccgtggaaatggccaactccaaccgtcattttgcggaagtgcacgagcaatcccatcagtaccaaaatcataacaatggccgtcaacccattgaataccagtatacatttgaccataaagctgatcattgtaaacccataagtcatctgggtcacgttgaacgtcataaccgtctgagaaatagtagcgattaccattaatagttcgccaaccagtagctactttcttagttgcaggatcatcataataaacttttccccagctagtagctactccatttgcatcaaagacataggtatttccatcgatacctaaaaacttagattctgctcgtgagccatcattggtaaagtaaaatttttggcctttaccactggtcatccactgattatcccaacgtgcaccgtcactaccgaaataataggtccgaccccaattagtatagaattggttggtataacgcgcaccatcggctccaaagtagtaggtgtggccccagttattatagaattggttcttatactgcttaccatcttttctaaagtagtaaagcttcccgttttggttcaagaaataatcgcgttgcatccgtccttgatcatcaaaaagatatgttgcatcgccaatagtggcaacttgtgaagttgcccgtactccatcgccaaaaaagtagtaactattgccccaacgattcatccattgattatcccaacgtgcaccgtcttgcccgaagtagtatacattcccccaagcattcttaaacttatcatcccaacgtgcgccgtcagctccaaaataataagtccgaccccaattggtatagaattggttggtataacgcgcaccatcagctccaaagtagtaggtgtgtccccagttattatagaattggttcttatactgcttaccatcttttccaaagtagtaaagttttccattttggtttaagaaataatcgcgttgcatccgtccttgatcatcaaaaagatatgttgcatcgccaatggtggcaacttgtgaagttgcccgtactccatcgccaaaaaagtagtaactattgccccaacgattcatccattgattatcccaacgtgcaccgtcttgcccgaagtagtatacattcccccaagcattcataaacttatcatcccaacgtgcgccgtcaactccaaaataataagtccgaccccaattggtatagaattggttagtgtagcgagcaccatcagctccaaagtagtaggtatgaccccagttattatagaactgattcttatattctttaccatcattgccataataataaactttattatcgactgttttaaagctatttggttgcccagtttcagtaatgttttgttctgaagtatcggtactttgtgcagctggagtaacaggaactgctcccttattatcattaccaactgtgctattactagtactttcagtattgtcgatgacattttcattactagtattagtttgagtctcagtaactgattgttgaacttcaacattactattatctaatgtagaatctgcttgaacagatcctacgcctaaaatcgtccccgcaagaacaactgctacagtacaccaaagtttaccacttttatataacttaaaatgtttctttaattccaagattattttctccctgattgataattatttaactacaactgcaaaacgtttaatattatatgaattttcaaaattacttgctgaaacccagtatgatcctccagcaggatcttcaacgtgataataacctggacgataaccatcaagagtcatcacatgactattattaacacctactccccagaaataattaccatattgaggggcagcccaatgcatcgtgacatagacaacaaccgggttaccattaagtaattgactttgtaagtcagtaggagaagaccctgaaatattctgaacattaccgaaccgtgaaccccattttgctaaaggttcgggataaattgattgaaagattccataggttactcgttgatatccgccaccgaatccttcattaggattaccatttggtgaaattggcatcgttttaataaatgattgaatgttgtagttgttggcatatcccttattatgaagcgcttctaacaaggctgtcgcttcacacgccatatcaccaacttgatattgattaatgtaaggcgcatttaataaagtaccattaattattccactatttggatcaacgtaatagttctgatgtccaagaataaaatcctgcttttgtagggcaccgtcatcaccaaagtaataggtatgaccccagttgttgtaaaagcggttatcccaacgagcgccatcactaccgaaataataagtgcgaccccaattattatagaaaccattatctaagcgacttccatctgcttgaaagtaataggttcgaccccagttgttgtaaaagcgattatcccagcgagcaccatcactaccgaaataataagtacgaccccagttgttgtaaaagcggttatcccaacgagcgccatcactaccgaaataataagtacgaccccaattattatagaaaccattatctaagcgacttccatctgcttgaaagtaataggttcggccccagttgttataaaactgatctttatattcttttccatcagcaccaaaataatatgtcttaccatttctttgttgaaagtaatctgtttgcattattccttgtgcgtcaaatgaatacacatcattattaatttgagctaattgattagtataacgtgcgccatctgctccaaagtaataactatgaccccaatttgtataccattgattcttagaaaggatcccattattgtcataataatatgttttattgttaatggtattgaatgtatttggttttccagtttcagatatctcatctacattattactttgagattgtggtattactggaacttgaatttttccttcatcactagtattttgatccgtaagagtttgattactatctgaagatatattctgcgttatttcaacattatttaaattttgattttctgttgtactatcagcttttgcgaaagtaggtgttactattaatagacctagagcaattgcagcataacaccatttctttccacttttgtatagcttaaaatgttttcttatttccaaaataatccatcccaactgttaattttaattaaacattattatcataatatatttttttaatttcgccgtttgtaaaattaagttagaaaaatagaaaagccatttgtggtagacttttgaatacccctaaacaaaagaaaggaaaccacaaatgacttacacccatcttaccacaaacgagctgacaatcatcgcccattctttcgtgcaaaagcttaaagcgtaccgagtggcccaaatgatcaaccgtagcgccgaaaccgtttatcgcgtttatcgttacctggaaaccggtgcctcaattgctgattatcaagatcactatatgcgcaataagcaacgttgtggccgaaaacgtactcagttgtcactggctgaacttacttatatcaacgacaaaattgcccaggggtggacgcctgacaccattattgggcgcgctgagcgcccaattagttgtaaccggcgaactctttaccggatgtttgaacgggggcagttcggtttggatgtccgtgctttgcccatgcgaggtaagcggcacccgaatggctatattgagcgccgcgggaaggctggccaattggggcgaagtattcacgagcgtgccaaggactttccgcactatgccactgaatttggacaccttgaagctgataccgtccaaggcaaaaagcaccaaggggcggtaatgaccctgaccgaacgccaatcgaaggtcgaaattgtactcaatgtgcacgaaaagacggctgatgcgattaaccaacacttaggtcagtggcttcggaaattcccgcagcacttcttcaaatcgattacctttgacaacggaaaagaattcgccggctggcgcgagattgccaatcaatttgaccttcacacttactttgccgaggttggtgctcccaatcaacgagggctgaacgaaaacaacaacggtcttttacgccgggacggcttaacaaaacagctagatttccgcaatcttcctgatgaattggtgacccaactgatgagtaagcgaaataacctgccccgcaaatcactaggctatcgaactccatatgaggtattcatgtcctacgtcactgatgagcaactactttctttctaacttaaattgacatttcgggtttgaaaaacttttttcaagaaaaaattatctcttacagaaaagagaagtcgctatttaataacagacttctctttggtaaatttattaagcttttacttaaccaagccattttaaggatgcggtatagtttacaataataggttctccatagtttacattactagtttctacggatgcaagccagaaatcataataatattgatttccatctgcagttgtatacgttttgcttccttttacttctttaggtaaaagactctttacatcattaacagtactttcgctaacatctttacctttttctccagttaaagcttctttgatatcttttgaattcaagataccagaaaacgcattatcacttttatcagttattaaatctccctgctttagaggattatcgattttaatttcctcattgttaacagtattccaaacctgagatattttaatttgtaatggagaagttgctacttgagtacctggttcagaatcaacgactacagttgccgaataatttgcaattaatggttgtccatacttggcatctttatttgcagaaacaaacgtatttaccttattatttccgccttcaagccagtaaatatagtgataccgtgcaccatttgctgctgtgtatacttttgaagatattccatctttaagccgtccagctagcttagttaattcagcattaccaatcgattgaccatcatttccacttaattgagtagttccgaaaaggtctgtcgataactttgttccttcagttaatccatcattaggaataacgtcagtctcattccaaatttttactaattgggttgaaagagatgacttaacatttttggggctttcatatccatttaacattccattataaacgttcaatgattgcagtggatgtccatgatcatcaaataatgaaatattatcccaagatgaacctccccatgcttccttgccatcataatacaatactgaatctggcgcatatcctttggcatactgtgaagcccatcccgaaccataaatgttagacattaatttattatattgccaattattccacccagcctttactgggatccatgctggttcccaataaaaagcaccgagacctttttgtgcaataatcgcattatacatatcctcaatttcgtctacctgaccttgaggatcagcactatatcgatctatattagtagtttcattattttcaccaacggagttatgggtgccatctgcatcgttagtattatttagccatccagattccaaaatcaccgttcttttaccaaattcattccaagccattttttcaatagcttcaagatttactggtgtattagctccgtatccaagatcaacattatcataccacccattgccttgtgtggtactccagaatgggtagtacgaagttccaagataatcataatctacattatttttctttaagacattcataatcccacgatatttattaatttccggagtttctaattgaatagcaactttaatagttggatcaattctccttacagcggaggaaccagcttgaatatatttagcaacttgatcaccatcactggtttcccataatgaagcccagttacctccaccattacgtccagtgtaaaggccaaatgctccattggtaatttcattaccaatttgaaccatctttacagatgcaccagctttttgcaaatcatttaaaattttagaggtgtaaaggtaaacctcttgactcatttcaccatgagataaatttctccaagcttttggcaaaatttgctgtgctggatcagtccaaaaatcagagtattgaaaatctatcaataatttaagaccattatcagatgcttctttagccatttttatgagattttcttcattattgtctccaccagcatatggctgcccctgtgcattataaggatcattccagactcgcaatcgtacccaattgacacctgaatcctttaaaattttaaataagttcgattcttgcccattaaagtcataaaattttacaccagcatttatcagcgcttggtaactcgaaacatcaaccccacgaaccatatcatcagtcattccagggatcttttcaacctttacactatcataacgaagtcctgtgtcagtcccggtcttataagctaagtctaactgttcatctgttctttcacttgcagggaccttactctcattagagttagtaccagtttcttgaccgaatacaagtgttgcagtgtaatttacctttagctgatctccgtatttagcacccttgttaagtgcaaggaagttatttaatttgtcatcagctgattgaccttctagccagaattcataatgataagcatcattaccattatagtaattcttagtgccttctactgcagaagtattacctgcaaaagcagcaaaaattgctttaagaacctcctgactaataattgtacctttatctccttttagaagttcagcagttccattagtcaaagcatttccgagatctgcactattaactacacttcctttagttaagccattatctacgtcaacatttacgccagccttcttaaagatatctgaaatagaagcactaatcgtggaagtagcttgtggttgttcagctttttctcctggtttaaataaaataattactaacttatttttatttaggtctgccccaacaccaagcaccgagttgtctgcatttgtaaagtcataactattcataaaggtattagtaatcttttgaggatcatcatttgtaaaatcagtagaatatactactaaaaccttaccactcagtaagttattagcttgtaatttcttttcaattacatttttatcaggattagtatcaccttgagctacttcttgtgcaatatcatgaagcgctaattcttgataatcgttattggtgtttcgccaatcatatttaacacctttaataccttggttagtcaaagcctgagcaacttccttagctactgtatctctagtttgacccatatcggaagtctcggtcgcttcaccattatcattaaattcgtatcctttaccatcaatgactcttacctgattagtaaccataattccttgattatcaaagtagtataccttaccatctctatttaagaattgatcggtgtaacgagcaccatcggaaccaaagtagtaggtgtggccccaattcttgtaatattggtcttggtacataattccttgattatcaaagtagtataccttaccatctctatttaagaattgatcggtgtaacgagcaccatcggaaccaaagtagtaggtgtggccccaattcttgtaatattggtcttggtacataattccttgattatcaaagtagtataccttaccatctctatttaagaattgatcggtgtaacgagcaccatcggaaccaaagtagtaggtgtggccccaattcttgtaatattggtcttggtacataattccttgattatcaaagtagtataccttaccatctctatttaagaattgatcagtgtaacgagcaccatcggaaccaaagtagtaggtgtgaccccagttatgataaaacttattaacaactaatgatccatttccatcaaagtagaataattggttctcatttgctgttaagaattgattttttaatggaataattccttcattattaatccagtagttaatcccatttatacttttaagctggttttgaagaagcgccccatcattaccaaaatagtaagcacgaccccattttaccatgtaacggttatcccaacgggcaccatctacaccaaagtaatacgtacgaccccaattattatagaagctattatctaaacgactaccatcattttggaagtagtaagtacggccccaattattatagaaacgattatcccaacgagcaccatcggaaccgaaataatacgtacggccccaattattatagaatccattatctaacctagcaccattggcttgaaagtaatacgtacgaccccaattgttataaaattgattacgatacaagtcaccattttccccataataataggtactaccattaatctctttaaaagaattcggcgttgatttctctggaatactatctttaatatctgtattttcagctttaacgttaactggagttgtttgttcttcactattattagatttagtttgttcttgattaatctgttgacttgaatctatatttttattctcatttatctctttttcattagtactattcttgtttgtgtcagtaaaagttgactccgaattagaatcagtatcactagtattatcgttttttactaaagaattattagcatcagaagtagatgtaatagtatctgcatcagctaaaacactaggcgaaccaatagcaagtcctatccctaaaacagtagttgcgattgctgcacaacaccattttttaccatctttatataatttaaaatgcttttttatttccatgacttttccctttcaataacgttttacctaaataatataaatcatcttttaaatcatttcaatcagatacttaataaaaaagcggtactatacattttcaaattatgtataatgcaatgccacttttttattacaattattttatttataagcaactaacttattagcataatcattgatcaaagtttcgttttgttcattattgtaaatagcggtaagttcctttaatggaatagctttctcaacaaatttcgaatgagcaatatcagtagcagtagttggatctacatatttaataagcacttgcccgtcttgaatttccttaaagtagaaccaacttgttggatcacccttagcagtaatgaaactgtagccatcatttacgcccgatgtaacttttccataatacatcgtatggttactcaaacaatccttgaaccaatcagcattctgatatagaccgactaatgttccaagatattgagtataatttactctattaataccatttggaattaatgctccatcttcattaaaaagataattttgtccattaatatcttgtttaccagttacgggatatccattttcatcaaaataaattgtacttccttcatacataagccattgattgactaacatccgaccttcactatcaaaataatgaatatgagtattagaatcatctttatctaagaattggttggtgtaacgggcaccatctgcaccaaagtaataggtattgccccagttcttgtagtaacgattttgatacattactccatcgttatcaaagtaatagaccttgccatctttagtcaaaaattggtttgtataccgggcaccgtctgcgccaaagtaataggtattgccccagttcttgtagtaacgattttgatacattaccccatcgttatcgaagtaatagactttaccgtctttggttaaagattggttagtgtagcgggcaccatctgcaccaaagtaataagtattgccccagttcttgtaataacgattttgatacattaccccatcgttatcaaagtaatagactttaccgtctttggttaaaaattggttagtgtagcgggcaccatctgcaccaaaataataagtattgtcccagttcttgtagtaacgattttgatacattactccatcattatcaaagtaatagaccttgccatctttagtcaaaaattggtttgtataccgggcaccatctgcaccaaagtaataagtattgccccagttcttgtagtaacgattttgatacattactccatcattatcgaagtaatagaccttgccgtctttagtcaaaaattggttggtgtagcgagctccatctgcaccaaagtaataagtattgtcccagttcttgtagtaacgattttgatacattaccccatcgttatcgaagtaatagactttgccatctcttgtcaaaaattggttagtgtagcgagcaccatccgcaccaaagtaataggtactcccccaattatgatagaacttatttgtaattaatgaattatttgcatcaaaataataaagttgattatcatttgcagttaaaaattgattacgtaaaggaattatcccctgattatttacccagtaatctttcccattaacatttaagcttttattctttactaaggcaccatcgttaccgaagtaataggcatttccccatcgaaccatataacgattattccaacgtgcaccatcattaccaaagtagtaagtattaccccaattgttataaaaaccattatctagccgagcaccactaggttgaaaataataagtttgaccccaattactatagaaatcatttttaactagctgtccttctgaattatagtaatacgtattattatttattgttgaaaaagtattaggagctcctgtttcaggaatagtttgttgtgctacatctttattttcagttgtttcaggcttaaccggcgtctgattatcactttgagtatcagtgccagtactattattaccttgtagaggattagtattagtgggagttccagtagttaaagtatctgtagcaggtgtctcattattaggcatcatatctgcatgcgctatcgaccctagactaatacctagccctagcgaaattgtagcaatagcaactacacaccatcttttaccgtttttatacattttaaaatgttttttcattactatcctctcccaaaaagttattacttaattaagtatatacctctatataaaattattaaacctattacaactttgccgttaacttcacatcaggatacttttgcttaaaccaattttcagcaaattggttttcaaacaagaatagtggctgatcatggatatccttgactaagatgtttcgtgatgatgacatcttttcatctaattggtctggatcaatccaccgggcagtcttagttcccattggttccatgacaacctcggaattatattcattttgcatccggaacttgaatacctcaaattgcagttgaccaacagcaccgagaatataatcgccagtagaataactccggtaaagctggacagccccttcttgaactaattgattgattcccttgtggaaggacttttgtttcatcacattcttagcataaacacggacaaacagttctggcgtaaattgtggtaacttttcaaattgaatatcttttttaccattgtaaatagaatcaccaatttggaagtttccggtatcgtataaaccaataatatcaccggcaacagctgtctcaacattttcacgggtatcggccataaattcagtcacatttgataaccgcattggtttcttagtccgtgataatgttacatccatcccccgatcaaattcaccggaacaaatccggacaaaggcaattcgatcacgatggcgaggattcatgttagcctggatcttaaagacaaaaccagaaaattcgggatcaaggggcttaacaacatcctcgtcctcagttttgtgatcacttggtgcaggggcaaactgtaagtaggtttccaagaaagtctgaactccaaaattagttaaagcagatccaaagaagactggtgtttggtcccccttggcaatcttttctcggtctaattcattaccagcaacttcgactagttccatatcatccattgcatcttgccattcaccatcaccagctaatgggttatctcctttaacattaccgtcttcatctaatggtaagtaaggattattttcatcagctgggtgagtcaaggcaacacgttggttaaagcggtcatagattcccttgaactggtgaccagaaccgattggccagttgattgggtaagtttcaattcctaatacgtcttcaacttcatttaaaaggtctaatggttcgcgggcatcccggtcaaatttgttcataaaggtaaagatcggaattccccgcatcttacaaatctggaacaacttcttagtctgcggctcaatccccttcgcgctatcaataaccatcacagcggagtccaccgccattaatgtccgataagtatcttcagagaaatcttcgtgccctggagtatccaaaatattgatccgcttaccttggaaatcaaactgcataacagatgaggtaacagagatcccccgcttcttttcaatctccatccagtctgactttgcaaagttaccggtcttccgtgctttaacggtcccggcttcacgaaccactcccccaaaaagcaagagttgttcagtaatcgttgttttcccggcatccgggtgagaaataatggcaaacgtacgccgtttattaactgcttcagcaagttcttttggtgacattaaatttttcctttcctatatattatttaatttaaatctgggtaatatctctactatattattacaattttttatgaaagtctattcttagaaaaagttacagaaagtttaaagtcttacgatatatttgaacttgatattaattttctgctatattaataaagttagaacttattttattgaggtactttgtatatggataataacaataatcacgaatcacgggaacattaccgtaaacggatggaagaacgtatccaacgtgacgttaatgagcgtaaacggcgagaacgcgaagaagcacataataatcgtgaaaatcgattgcggcacgaagaagcacaatcatcaccagactttcagccaccgcaaaaacaccactaccgaactcctaattgggtacggctcctgattggtctcctaatctgccttgtggttgctggtggattttacgaatatcataaagttcactcagttgccaaaggagtgtttggcgctggtgatggtaagattagtaagaagctgcaaaaaggtgagcctgtctctgttcttacgatgggaaccgatgttggtgccctagatcggggtaacaagggtggtaataccgattcactagaattattcaccattaatccaaagaacaaaacaatcacaatgacgagtattccccgtgacattttagttcgtgtcgaaactagtgatggtccagactatgtcaaaatcaatgcggcttatgcaattaatggccctaagcaaaccgttaaacaagtatcagaactacttgatgtgccaatcgattactatgccgttatcaacatgggagttctcgaaaaagttgtaaactctgttggcggagttgaagtcaataatccatttgcctttgactatgaaggtcatcacttcaaaaaaggaaaacaacaccttaatggaacaaacgcgttgaagtactcacggatgcggtacgatgatccaaataatgactacggtcggcaaaaacggcaacaacagattctgaagagcgttatcaataaattcaaaacttccggatcaattggagcagctaataagattcttgatgctgttggggatggggttaaaactaatattccgattgacgacattgcaaccctttatggtaactaccatggagcaatgaataacgttaaaacgtaccatttccaaggtcaaaacgcaacaatcgaaggagtatccttccaaattgccagtccaaaagaaatcaaccgggtatctaaattagttcgtgcgcaactgggcttaaaagctaaaaatgttgttaatcacgaaactaagatgtacaagtcgcaaccacactacaacggatataatgaaactaacttcattcttccaggtggtgcaagttacaacgatcctggtagtggtaatggtagcgatgaggttactggctctagtcaccattcacaaactagtcaaaacgaaggagaaagtacctcagtaaacaatagcagcgaagcatacagtgaatcacaagctgttcctgctacagaaaatcatgcacaggctgctactacccaacgttactcaacaccgcaatatcacacttatcgcagttataataatggttatcattcaacctacactcacccagcatacggtaaccattatggatatacacatcgatattattaaagaaaaaatcttcgttgaaattaaatcagcgaagatttttctttactcttgttcttcctttattggatgttcaattcggtaaatatcaaagaagtattcacaaatggtcttaataaccgcatagaatggaatacaaagaatcattccaccaattccagcaatatgaccagcagcaagcaacagcataataattgttaacgggtggatttgtaatgtcttaccaataatgtttggataaacaatgtttccatctacctgttgaacaacaattacaacaatgattacccaaataattttatttggcgccattgttaatgccacaaataaggcaggtgcaatcccaatataaggcccaatgtatggaataatattagttagtccagcaacaattcctagcacgattgccaatggctggccgataattacataaccaattgatgtaaacacaccaacaaataggcactcgatcatctgtccggaaatatatgaggacaaggtggaattcatcttcccaagaagctcattcacctctttagcatgatgcggtgaaagccatttctgaatacttggaataagcttagaaccatccttaagcatgtagaatagcattacgggaacagtaatagtcacaacagtaacgtttgtcaacatcccgataatatcaccaacccgttcagatagtccttgtagaactttttgagcatagccagctaactggtgatcaaactgacggtaataagaatttaaatcaacgttctttaaaaatgagtgttgaatagtatcattaattaaatgctgtaatccggtaactgtttgcggtaaatgacgaactaaggaagatatttcctttactaccggcggaatcagcatcgttatcccccgacaataatcacaattagcaacagcacaattaataaactagctagccccttgttcatccgaaaacgaccaattttaatcttcataaaaagctttaaaaccggatttaacatataatacaagaagccagagataatcaggggaacaaaaacaactgaaataaaagttaaaaatggttgaaatacaaactggattttcgtacacatccagattaaagttgctatcgacaataacattaacggccaaaaagccaatgataaaatttttgcttagacatagatactccttaaataaaaagaatcaatatgtccattataaaagacatactgattcttttaaattataagtttaattacctgtaacagaattggcagtaacatggtaagtatgaccatttccagatacagtccaattattagtaccgttttgcgtagcagtgtaaccatctactgaatcaattgatggcaaatcatcagtagactttcctgctaccccacgatcatttaattggttaccaatatgttccttaacaatattccgcgcatcggtagcagtcattgttgactgttgggcattagagctttgttttacgcttgacttagcagaaccgccgttacttgatgtcgttgttgaagaaacagcataattagcattacttgatgagttacttgcactagaagtactattcttagaagatgcgctattttcactagtttgagaatcttcattactattacttgcagtttctttttcagaactaaccttatctttattagaatggtgcttcttagtaaccttacttgaggtaacttcagaactactatcagaattatcagaagcgctattattaccacacgcagctaaagttaacattaaggtcccagcagctaaagttgtaaataatttatttaatttcattaaacttctcctcgtttctatatcatcgctattataacagagatcattattaattacagttaactaattatatcagaattacatattgatgtagaagcttggcttaaagtattttgagtaaccgatctttacaacgtcacctggttctggggcatgaacataagtaccattaccaagagaaatagcaacgtggtatggtgcaccatcactaccaaagaataataatgaaccttttggcgcattcataacatcacgcttgtgaattcctaaagtagcttgttggtaagtagtccggtatgatgcccctaaaccataagcccattgaactaaaccagaacaatcaaaaccagctggggtgtttccaccccagacataaggaacaccgcgttgtgataacgcacgatctactttagcatcagtattattctttacggttaaaacacctgctgaatcagcatgatatttcttaccattaactgttacatcattattttgaactaaagcaccgtcattaccaaagtaatattggtggccccaattagtataaactgaattatctagacgagcgccatctttaccaaagtaataagtatgaccccagttattgtagaaactatcgtctaaacgtgacccatcagcttggaagtaataagtatgaccccaattgttgtagaaaccattatctaaacgggcgccatctttaccgaagtaataagtatgaccccaattgttatagaagccatcatttaaccgcgtaccatcggcttggaagtagtaagtatgattattttggtttaagaaataatccttttgttgttggccttgatcattaaagtaatattgtgagccgttgatgtctttaacaccagttgctttttgaccatcactgtagtaataagtgttaccattttctgtttgccaaccatttaattgagccggtgcagctgcttgaggcttaacggctacagcatcagtagcaatacttgtactggtgcttgctgactgagttacttgacttgccggttgagcaacttgactagactgagcttggttacctacctgtgatgtattatcagtagccgtactattattgatagctgtttgatcagaaacttcaacttgttgtgaagttactggtgtagttgctgcatctgttgtgtcagcattagctacactagtagttgatactccaaatgcaattgctgctgtagcgattgccatgtagcaccaatttttgcccttcttaaacattttgtagtgtttctgttctcccattattaataaatcctaccttccatttgtcatttcttttctttagataaatttaacgattattactttaccacaaataaaaggctggtaggcaaatctggctcttttgttaagcaatgataatgttcgcaatactaatgtaatgagaatgtcataatcgagtaggagataattgattagttcaattatcgacctctcacaccaccgtacgtacggttccgtatacggcggttcgacaacttaatcacattgaattgactggagcgtcttggatatattcataagtccaagacgctccagttttctattagttagagaatagctcaaggtcttactatgtgcagttcgccagtagcccttgcgggtactagcgaagacatatgcatcacgctgggacagccccaatttctgtaagttagttaccttagttttaaactttttccattgcttccagatatactgccttattcggaccctcaaccacttgtcgaggcgttgaataaagttagttagtttcccaattgagtagtactgaagccacccacgcatttttcgatgaatttcttcaaacattcttgtcagagatattccacgattacgtttagttaataacttcagcgctttctttactcgttgttgcgattgtttagctggacgggcgtaggccccattgtggtctacacccaacgaaaagccaagaaatttcaaccgtagagggctaccgactttggttttatctgggttcactttaactttcaagcgcttttctagaaactgggtaatgcttcgcattactcgttctccggctcgttgacttttaacatagatattacaatcatccgcatagcgcacaaagtgatgaccacgtctagtcaactctttgtccaactcatttagatagatgttcgccagtagtggtgacaatggccctccttgtggggttcctttttcactcttagcgaaaagcccatggtctaagactccgctagttagaaacttacgaatgagtcttagtgtccatgggtcatcaatatattgttggagatacttaatcattaagtcatgattaacgttatcaaaataggcttttaggtctaagtcgacaactcttcgatagccttgattataaagatctactacttttgcaatagcgtcatgggccccacggtggggacggaagccaaaactattatcagagaaaacacgctcaaagataggcgtaataatttgggctacagcttgttgaaccattcggtccaccacagttggtattccaagtcttcttactccaccattaggcttcggaatttctacccgtttgactggtgctggtttatacttgccctcacgcaaactagcgatcagttccatcttattttctctgagatatggcagaaggtcattgactgtcatatcgtcaatgcctgctgctcctttatttctcttaactcgcaaataagcctgattaaggttattgcgatccaagactaagtcttggatagtgacactcatacctttaacttcaccataaccggtactacgcgcccttgtgtactttcggttttccaaacctatcctcgacaagaggtcagcttgttgttctgttttctgcgatcgtcgcacctgattacacctccgatataagttacaagttattgtcgttcagtccttcatctgattactcaaactactatgacctcggctgactcctgacttactcaacgctacatcactgtaccgcttgcttctgtggaaatttatcttattcctcttgtcggaagcttgtaagtcaggcctccccgggtaagaatattagctttcgtaccatgtcatcgttagctttactgagaccaacttcgagtagtattggacttcaacttgtctagcagccttatccagttaatttcagccttatagctacttcttgttcatcgatgcagtactttgccttagacttccttcagattccacctcacggtggacacccttgtcctcagttcatggttccgactactacggcccatagcggactttcaccacctagctaatacccatgccgggcgcactagaaaagcagtccatatcaccaagagaatatgaactgctttatttttagataaaattaaagattaaaggctacgcggtcatagcgggttagatcataggtattaattacactacgtaatgaattagtatagctagatgctgttgcataaccatctgcccgaattaaataagtagctgtatttgcatcacgaaccccaattaaattatggtaacggctattcttaactaagaagtcagtatggtcctgaacactagcattattatctggatagcgacggaaagcatcattaattaagaccatccgtccaccgtactcttcataggttggcatattaactgacatacctttatagctccccttaataccaaacaaattgtggtattgtgaagcaagcgaagacttaccccatgcgctttcaagaattgcttgagcaagtgttaatgacggcaagatttgatgttgtgtccatccttgaatagcaccattgacgatactgccaataaaagcattattagaggttaaacgtccttgactatcaaagtcaagattaccataacctaaattaatagattgaccttgaagcaatgccccatctttgccaaagtaatatacattaccccaattgttcataaaacgattgtcccagcgagcgccatcactaccaaagtaataggtatgaccccaattattataaaaactattatctagacgagcaccatctttaccgaagtaataagtatgaccccaattattgtagaagccattatctaagcgagcgccatctttaccgaagtaataagtatgaccccagttattatagaagccatcatctaaacgggcaccgtctttgccaaaataataggtatgaccccagttgttatagaaaccatcatctaaacgagatccatccttttggaaatagtaggtgtgaccccagttgttatagaagccatcgtttaaacgcgtaccatcagcttgaaagtagtaagtatgattagcttgattcaaaaaatagttcttttgttgctggccttgatcattaaagtagtagtctttaccgtcaatactttgttgaccagttactttttgaccatccttgtaatagtaattattaccattatctttttgccaaccattttgagaagccgctgcctgtggagctaccgcaaccttactttcacttaaagttgcttgaacattgttatcttttgctggttgattaatagtttggtcagcttgtgtattattattgttattcgtcgatgcttgtgctcctgcttgatcagtagccacattatttggtgttgaaggtgttgttaatgatactgtattggtaacttgacttagtgcatctgctgaagcattacttacactttcagtatcattggctgtagtatctgcattaacactttgagaaacagatagcgtaccaacagctactgaaagcgtggcaattgccatgtagcaccagttttttccctttttaaacattttataatgtttatgaacactcattgacttatttaccccttttttatttttaacattatctatcctatcacatgtttttaaataagttctcattctattaaattgttactaaaggataatttttgaaatatttttgtaacttaaaagcgttgattaatataatcaacgccctatcatattattagcttaatttagaatactcataatttactaattgtagaaaatcattcatattatacccagtaccaaaataactgctagctcgattactccagtaaccatctggatcagtatgattagtattacctaagtattggctaacattatggtgtgaccaaagagttcctgttccattggactgagctaatgatggtgtcaatccgtacttgcgcatgttgtatgccgtgtagtaagcagcattaactaattcacgagcaaaattccaggcaccataaacttcaacctgttcaaattgaacagcacgaccgttggcaggatatgcagctccccatgcttcatgatcggtatcggaaatttgaataatgttattagcatcaacaaatgcatgaacaaacgcactattataatgctgcttttcgtaattaatttcaccccaaatactatcattgggattatcggtttcatgtactactaccatattaggcttaccgtctgtcgttccggagtatgaatggctacttacatcaggaattgcattaacatatgaaatattagcatgaccaataccattattcataatgtaactattaatcttattattgtaaactgagattggtaaaagaatcccactgttatcggcacgatagaagcttccattaacccaaattcctgtgccttgtactagggctccatcattaccaaagtagtaagtatgaccccaattgttataaaagccattatctaaacgagaaccatctttttggaagtaataagtatggccccaattattatagaagccatcgtctaaccgaacaccaccttgaccaaagtagtatgtgtgaccccaattgttataaaagccattatctaaacgagaaccatctttttggaagtaataagtatggccccaattattatagaagccatcgtctaaccgaacaccaccttgaccaaagtagtatgtgtgaccccaattgttataaaagccattatctaaacgagaaccatcttttggaagtaataagtatggccccaattattatagaagccatcgtctaaccgaacaccaccttgaccaaagtagtatgtgtgaccccaattgttataaaagccattatctaaacgagaaccatctttttggaagtaataagtatggccccaattattatagaagccatcatccaaccgggtaccatctgcttggaagtaataagtatggttagcttggtttaagaaatagttcttttgttgctgaccttgggcattaaagtaataattcttaccgttaatggtttgttgaccagttaccttttgaccatctttatagtagtaactactccctttatctgtttgccaaccattctgtagagcggctgcttgcggagccacagcactcttatttgtggctgaagattgttgatcagtttgagtagttgaattagcctgatcatcttgcttagccgtttcacttgtactttgcgttgcaggtgttacttccgcagcaacatcagtcgtttggtcctgtgccttttgtgaagctactataacactggtggtattgactgtactatcagcacttacccctgtgaaactgataaagcaccaactgctactaccaatgtggcaattgccatgtaacaccagttctttcccttcttatacatcttataatgtttatggatactcattgatgtgtacctcccctttttatttataatattatctatcctaccataattacaatttttaaaatttcatttttttagaataattttcatatcttatgtgaaatctaggtctcatctttacctctgtaaagattttacctatatactcacctaagacacttagtgaaagaagctgcactccccctaaaagccaaatcgatatcattaatgaggaccagccagaggtcgttccccgctaaacttctgaactaacgtataaatcataagaacaatacttacaataattactaatattccaagattcattatcaactttattggtgttgtagaaaaagaagtaattccgtcaaaagcaaaatgtatcattttctttaatggatattttgacttaccagcaaatctcttctttctcttataaaaaactttagctgattgataaccaataagaggaaccatcccccttaagaatagattccgctctttatattccaacaaagctaaaacagctttcttactcatcaatctataatcagcagaattgggtactaactgtactcctagttttcgcattagtgcatagaaagccaaggccgtgttcttcttaaagaaagtatccgtttcacggctgctgcgaacaccataaacaatttcatttccttgatgatatttatcaatcatttcatacattgcattaacatcatcttgtaaatccgcatcaatagtaatcattatatctgaatattttgaagcaatgcttagacctgctagtagtgcattttggtggccataattacgcgtaaaagtaatcccagtaacatatgaataatgtttactatagtcctcaattagtgtccacgtattatcgctgcttccatcatccacaaataatattttgcttttagcagagacctttcccccatcgattaagtcatttaaaatcttaccgacttcttttcgtgtttccggtaaaacttcttgttcgttgaaacacggaataataatcgttaatatatcattcattagttttcccctatactttaactttttgttctattgaattaaactagtaatttttcacattgtttctctaggatcttaagattttttcatagaattgattcagctcttttaattgacttctaagcctctttaacttgctaaaaaataacgtttaatgggcctcaactaaatttgctaaaaagctagatactatatcaaataattttccaaatagctttctaataagaaaatcaattataatacataccgtaaaaaccaaaaaagacactattaatgcatttcctaaatagctaagccaattatttgcaaagcaatttgaattagcaatatgctgccatagaataggacggataaacgagtcctcgctgatcaagtataccccaaacattgacaaactaatctcattaatcactttgctataaaattcaaaccttgtgaaaaaaataaatatagaaattgccaagaaaaggtcaatcggattatagagtaatacaaaaatattataatgattatacaaaaaactgttttgagtacacaaatacatccacagtactactattattattcctataattagcatcttccagagattattacctccatataaaaattctagtccgtgtctttgaatgattccaccaattaaatataataacaagaaataggctcctgctgaattaccgaaaacatcatacgtaaaatcgggtttccctggaaaaataaatccgagagtcggcaatactgaccaaaaaagcactagtatcataaacgtatttagcaacattttcatactaaatttttgtaatattaggttcattgccggcatacatagtaacataaatatatatgctccaacaaaccaatatccacttggcaaaggaattggcaaaagtaattgtgatactgtttcatctacagacttaggaaatagaagttttagtaaaccgaatatcaaaaagctataaaatacagttattgttactaacttaatcggtcgcctaacactataacttttctgagacagaaaatatgcacctagaattacaaataaatctacccctaacttcccaaacaacaaaattatcatatttattcttaaagtcggtaggtttgctatagaatactgatgccaattaaaagtcccatgataggcataatgatgtagcacaattgcaaacatactaataattcttagtaattcaaaactagagtttcttcgcactttcatatagaactctccctacattttatcctttaaaataatacgttgtataatatctgcccgtttgtattgttttataagaagctttgtccatttttataccattttgaactatatatacccctctttttttactcttcaattttctattgatcggcaaatcaacaatattccattttccaaagtgattataagtcataaattctgatggctgagcatatagagtctctctatgaaattcataaggattaatttgttggtagaaaataggtaaaacaaaataggataatgaattcgtttgtctaatatcatggctagaaactaaaaatacattattataagacgcagcatgatgtatcatttcttttaattcacttggtgttgtattttcatagttgttgtaagttccgttattataatcattaacataagatttagcggcacccaaaaagaaaagagtaaatattaccatgaaagtaattaaactttggtaattatcaaatgcttccattattccccttgcctcaaagtaaagaattggaactataattgcattaaaatgcgtaaaattaggctgtatcaaaagtaagttccataaagctgaaattagcattatgaacataaaagtatcaagtaccgacttttctttaacaatataggtaataataccgatgcaacaaaaagaaagcattaatggtaaaaaagctccaaaaaattgtggagttattttaggaatcccgtcataaccattaattagcattttgatagaatttgttaggttattaataatgcttgttaataagtgcctattctcaatagcaaaagctgatcgagaagtggctaacttagtagctgtaaatcctccaaagaaaatttcccttttactaataaagttaacatagaggaaaagaattaatggaaggcattctattaataaaataataaatgagactagcacttgtttaatgtcaatctttccttttagaagaagccatgtataaaagcaaatagcaaaagaaaataaaaaaatccaattattagaataacaataagctaataatccaataaaaatcgttatagtaatcaaataagcatttcttgcgtacttactagtcgttgatataaatagaataaataaacttaatataactacgactagcggaataaacaaattactctcaatagcccatctgctagcacatatagttaccggacttagaaaaataactatcaatagcattaatctttgaatatttttaagtattcgtgtcttatataacgaatatgttagaagcaggattgagactaaattaataataattaatggtagtcgatacgtagtaatcgttaatcctaaaattttaacaaatggtactgaaattaagggatataagatattcattccagaaccccaggcatatagataaactggatttttcactaaatgaaaataatcaacaccatactttcccaacgaccaagagttaattcctcccattgcttcatcaagatccaaattaggaagcttatcaaatttataaattctaaccataaatgccaaaattaaaaataccaatagaaatattttatatttgatacttacttttcttattgtatcgttctttcttataaacacagctataaccaaaaaatatactattgtaatagtgaaatatattatctgcattacattgatcctttatttatctgccttaactactatccaattaataattgagtggaatataactaattaattcaattggcaatcactccacactattatacgtacagttcgccagtagttcttacacatactagcaaagatatatgcatcgcaataaaacaaaactaacttttgtaggtaacgtcattaagttagtgttttaatacttaatgtttgattttctctctgtattttgaaatattttagttaacttaaaaaccatctaattggcaattccctgattgttaattaggtggttttgtctatttaataaattgttatagcacttccattgtattcagaagcaacgctcccccacgaacgccaactatctgctcctgtatcataagcatttcctcccattgaatgcgcaccttgccctctgccccagtaacatggatccaatacgtggaaatagccattagactcaccaattataacttttgcatgattacgatttccatacatccgttcaaaggaagaaaatccataatataataccggatgaccagtggcaactatagaagcaatttgagataagtccttaccagaaatatcacgtacactactatctatatttttatatgcccaccatgctaatgctcctgctggaatgatacctgaaaaggcaccagtgttatacacaccgccagactgtggtacatggttataggcatatcctagattaaaaaacttacctttagtacttaataacattgccaatgcagctactgagcatccttccggtgcattgattggtgtaaattgactaaagtattgagctgtgcgcaaggaaccgtcagattgagcataccaatcttgtgagttaagaaatacataaccatttctcagcaaagcaccgtcatttccaaaccaatatgtatggccccaattactatatgtttggttagtataacgggcaccatcatttccaaaataataagtattaccccaattattataaaagcgattatcccaacgggcaccatctccaccaaagtagtatgtgtgaccccaattgttataaaagccattatctaaacgagaaccatctttttggaagtaataagtatggccccaattattatagaagccatcgtctaaccgaacaccaccttgaccaaagtagtatgtgtgaccccaattgttataaaagccattatctaaacgagaaccatctttttggaagtaataagtatggccccaattattatagaagccatcatccaaccgggtaccatctgcttggaagtaataagtatggttagcttggtttaagaaatagttcttttgttgctgaccttgggcattaaagtaataattcttaccgttaatggtttgttgaccagttaccttttgaccatctttatagtagtaactactccctttatctgtttgccaaccattctgtagagcggctgcttgcggagccacagcactcttatttgtggctgaagattgttgatcagtttgagtagttgaattagcctgatcatcttgcttagccgtttcacttgtactttgcgttgcaggtgttacttccgcagcaacatcagtcgtttggtcctgtaccttttgtgaagctactataacactggtggtattgactgtactatcagcacttaccccctgtgaaactgataaagcaccaactgctactaccaatgtggcaattgccatgtaacaccagttctttcccttcttatacatcttataatgtttatggatactcattgatgtgtacctccctttttatttacagaattacctaccctaacataactacaacttcttaaatattttagaatgttttagaaaccccattttttaccttcccaatttcattttctattcaataatagcaaattctttgtaaattagaaatgctcaattaaaaaaacttacgtacttcttgcaatctaaattcaaattcccttctctcctgccgttgaatagcatctagtgttaatccactgtaaaaagagattatagctgctattgcgcaaaagccacatataataagtgtcggcatgtttgcaacaactccagtcatcctatatggaatccatacacgtggaataaatactgctatcgatatgatcatcagtattaacgatagtataccgtagaaattaaagggcttatgattccggtataaagtaaatattaacctaagaaccctaaatccatcggaaaaagtatttagctttgagacgcttcccataggccgatcacgataatcaattacatagtttttaattgccatattattcactatagcaaaaatactcatttctgtttcaatttcaaatccacgtgataacactggataagtcttgacaaactccaaactaaaagcccgatatccagtcataatatccttgatatcatttttaaagaaaaaattaatactccatcgtactagtttattaccgatcccatgaaaagctcgcttattttcagtaaaatagctagaactaaggcgatcaccaattaccatatcatatttatcttttaaaatgtaattagccattttaggtatttcttcagctggatatgtatcatcaccatcaatcataatatagcattcagcattaacttcgcgaaacattctcctaataacgtttcctttaccttgtttatgttcataacgaacaattgccccagctttttttgcaagttctgccgtattgtctgtagaattattatcatatacgtaaactttagaattaggaattgacgaaacacttttcaggcaatcttcaacaactttttttattgtttttgattcgttgaaacagggaattaatatagcaattctatccacttaacattcatccttccttacatttcttatatagtaaatattatttttaaatatctcaactatattcacaaatccaattcctgctaaagtagtaatgaatgggagaaattgaattaggtatctacttcttccgccttcaaataaaagcaaaaatatcattccgccacttactacatactttaataactgtacttctatttgcgaattcggtaaagtagctaaaatacacaatagtacaactatccatagactttgtacaattaaactattcccagaccaatcctttcctgaagtatccgaaacgtatgttttttgaatttttgctatcaaaggattcttagaattcgaatatggtatcaaaaagccaacttcgccaccatcatttcgccaaccaaaagtagcatcagacgtattagaaatttgtttattgaataaaaacttagtatagccgagcacttgtttctcgtgcaatctttcttttataaggttaatgttcatttgatttcttttactttgatctttaattttttcattaagcaaaacatcctgttcattatatcctccaccttgtgctagtcccattgccatatagtgtgtaagagtcatggctctttccttttcaacttttacaagactggtatgagaagctgcactgttgaacacaggaattataattaacggtaaaattacgaaaataattaaaataaaaaaatgctttttgctgatttttctattcgtcatctcaacaaatcccattaatatccaagcaaccatatataccatcaaactcggttttactaaataggaaatagctaataatgtcccaagcccaaggcatagataaccttttttaccaaaattagatgttcttataacacgataacccattgctagggtaatagtactaaaaaataaggcccaaatatcactatatggtattgctattagtggagaaataactattaaagtccaaaagaaaaaagctgagactacagatatttttttgccaaatgttttttttagcgaagagaataaaataagtaatgacgtatccaataacagcaagtttataatattaagaatcttagttagtgttattaatctagggtgccctgcaactatataaacaaaatgctcaaaaaacagcaataataacgtatttggataaaaagaaaaatagtcttttacccaataactatgaccagcagctgctctcactattatagaaggatcccatgtagtacttccagctagcgacatcacaatcataaattgccaaagaatcgtaactagaaaaaatagaactagaaaaacgcgtttattcaatactataaattttcttattttctttgccaaataaacgctctttccccaatatgtacctataaaagctatcagcattatcaaaacgatactgatcaacactattagtttagaggatcttccaataatagtcggtaaaaccacaatggcacctattatagatactacaactaaaattactagaaagaaattaattattagattacttaatcgaattagcttcatgctcttccctccatcattttttgactctctgatatcataattccaacacataatggaacaactgaaacaatcgggaaagcatatctatataaaacaacagggcctagtaaaaatgttcctagtaggcttaaagttaaaactattaggaaaatatattttctttccttaaaaataatcatccacgctgtaaagaataataagataaaaacattaaaaccaatgctatcaatcatcgatattacaggaatacgctggtttggataactattaacaaaattagtatagaatttatataacggttttaaggctttaggtgttgctactctttcatgatgccatgctttctcatttttgtgttcttgcttaacgtacgatgaatattctaagaaatacttgtaatagcttcttcgatccggataagaggtatctgggtaccaataaccaatagtcatcttagcaaaagcattcaaatattcattaggattttgttttgctaatttgaaccataatttccaaaaattctgtttgttttttatatactggtcggaattaaaactagacttaagtggatcagataaagactgacaattttgagattcatacattttataatttggaatataaattctaacttgatttacctcatctgaagtaatatccaaatttttttgtgacgcaacacttgaaagctgcataattggaatgctcaaagattcacgtaccctatcctctttatctatatgcccatttagacttcttgtcacggggccattatagataactgttccaaaaagaattgcaatacaacttaatagcagctcttttcgaatacttttttggaaaagaaatgcgaaaacaagagaaagcgtgataacatatacgccttgattttcaaatattaaattaatgagagcaaataaaacaaaaatggtccaatactttaactttccgaactttaataaccaattttttctttctaaataccacaggactagaataataaaactagctgtataaggtacattttttgttacagaaatcgacattatgcctatatatggtgaaaggcaaaaaattacaaaaaaacatatacgaatagcatagtttaaatttatttttcgtagatattctaatactcgagaataagcaaacgagagccataagatttgtaaaaacgtataaataaacagtccttgtgtctcgccacctaaaatatttctaccaatttttaatacaaagaaaattagtagttccgtatgtgcaagtggatgatgaagataaatttctctagtatttagataactttgtaattggtatcccgcatcataggcgtaattacctggataggtagcaaatagttctattagccaaaatattatcataccgaaccaaagcaacttccacgtttccctgcaattgaagaatctttgaagggcattattagtagagaaaatagaattgagctgcggaagagaaagatatatataattaactattacaaacaaaagaggtaaattccctatcacctttatccatgtctttaacgacatgaaattcacattattataccgatataaatttactccaataactagtaatattgaataaatagttgccaaacataaaagaacgaatattgatcttcttgaattttttaaaaaatcagttgaactatacaatttgtaaattacaacaaatagtaaaacggaactccaactatttgtatatgataaaccttgattaggatctttaattaagtattgaaaaaacacaactgcttcaaaagaaagaataaaagctaacaatttatacagactttttctattttcttctatcatttttcttcctttcttttttaactaagaaagtctttaattcactaaaagggtgttgccgatgcatataaaatgatcttaaaaaaggtatgtacggcatcattaacgcaataatcgacacaaataatattcggtatacaacaccaaaagcaatggctggtaaatagccgaaatgattatttaccatttgaataaccttaggccataattgtacataatcaagatcaattaagtggaaacataataaaataagagactgttctccaaaaaataaaaagatcctttcaaacacctctattacactagcagttaagttttctatatacatactaaacttcataactactatacttgacgttatcccaactggaagcgcaatataaatattcgttgcattgaccccttcaaaatcaaataggttaaaaaatgcatcccaaatccacaataatagcagcataactattactaaccaattcaccttggatagaatattatacttttttatcaaataacctgacatgagaaagcactgagctattaacgcaggttgtactgaaaacggcaaaaagaaatatttagctgtttgaacacctaccaaagttaataatattattaccataactttgtatcgtacttttattttgagtttcataatcaaattaaaaatttgattagcaatgaacattgccattaaaaaccaaatagcacctatagcttttatttttatagatgtatctggaataaagacatctccacctgctccataaatagcagagaagaaaaagtctctaaatgatgaacccctactaggcgcaattatactgttaggaaccattctgtaaaggaacaataagataaatccaatcgcaactgttgcaatgtaaggcattaataggttaaaaaaattctttttttctagtgttttctgattttgctcatgatataaatatccacttaggataaaaaaaattggcatatgaaaggcaaaaaggaaattacccaaatatccaggccaatagttgcctaacgaatgtcccgcaacaactgcaataatagcaattcctcttgcaatatcaatccatgcaattcgtttattttttgtattggttttcatctatcttaaaatccatttccttttaaatttagtttcctccagaagaaagcgaaaaatgaaggaaagtaatagttaagccaataaattattttatctcggctaggtaaaatatcattctttaaaaagtcataacgatactttttttgattgtttctcaactcatccatcaatttgggagaaatttcttttttattaggagctaaataaatatttctgagaatagaggttgaactccatagaattgatgcattaatggcactcactactttaggataattcattggctcaacaataagttttattaaactataagtttttaaaacatctaaggattcttttttaaaatcactaccgtacttattagaattaatttggctatcagaattaactatataatgatatttcacttcaggatttaagctaatacggctacaatgagataaatatttacaacagaatagtaaatcttcagcaatcttaatcccattatcaaagctaattttattctctcttataatggataatttaaaaagtttattccataagtatccttcatagccggtactaataaaaatatcatgtaatgcttcttcacgacttaagttttgctttgtacctaatcctttaaaacgaactatcccatttttttcttctttgcagtatccaacaattgataaatcacactgttgtttcttatattgatccaacaataattccaagtagtccttttcgacatagtcatccgcatctataaaagtcacatattccgaatttgccaattcaagacctcgattgcgcgtatctgaagcaccagtattagatttattaactacctctactctgttatcatctttatattctaacaacttatttaacgtaccgtctgttgaaccatcgtttaatacgattattcgatatttttcttcagtggtttgattaagtaagctataaaggcaacgatcaatcgtatttattgcattaaatgccggaataataatgttaattttctcttccatctgttcttctctcttttaatattttcttaacttgatttactattggtgcacgtaaagcaattatacaaatgatataaatcaaggcacccaaagcaacctgtaatattaagttagctattgtcatattcataatattatcaattcttgatacaactaaatacataaaaaatccacttaaaatatatcgccatataggcgcaaataaccgtctacgtcgtattgttccttgaatataccatagctgaacggctgttactgaaaattcagaaattacagtagctactgccgcaccatttgcaccgtatcttgaaattaaaaagaggtttgtaataatattgactaccgctccaacagttactgaaatagtaaattcgtgttcacgatgaattggcattaaatattgggttcccgtaacattactccacgcaatcatcaaaatagcaggtgcttctaaaaagattacacccccagtcggctcgtactcatgtcctaaaaaccaaggtgcaaatttataggcaatcgccattaaaccaaacatcatcggaactgaaacagcagttacaaagtcaaatgatttatataaactatctctaacccctttaacatccccagaagcaaacttatttgcgatgtgagggagcattacagttcccgttgcagtaactattgctaagaccaatttcacaatattatctccaaaattaaattgcgaaaccgctgcttgcggtgccatgcgccctagcataatccgattaaccactaagtatatttgagtagtgattgttggaatgaataataacaaagctggataaaaatgttttaacggatgccattctttaatttttacccattgaatattttgtcgtaagtatggccataatgtaagactacccgctaattgagcaaatcctaataggaagatatatttcgctaaatcgccttgattacgaaccataataaaaatcaaggcaatcgtaattaatttaacaattgtatttctggaaacagttttcttgaaatcttccattcccataaaataccacgaaacatcaatcccgtaagcaacaatccataaagcttgtaagagaaaataaaccttaaatgcgctactgaataataaaaccgccaataagtatattattagtgcaattgaactggtaaaaatctgaagagacattatcccccaaaaagtttttgaccgattatatttatctcctcgttgataggctatttctcggttaccatacaatgaaattccaagttgtccggcaagatagaaaaaagttacccatccattcgtataagtgttaattccgttattatttgcgcctaatacccgtgatacatatggagtggtaatcactggtgccaacattaataatatttggtatcccgcattatataaatagtttttaatgaccttcatacaataacctcgtctatcctttcaaactaaaaactaattttaccactgtcctcttataaacaaaaggtaaccttaatcaatattaaaaacgacgagttaagttttcccactcaactcgtcatcaggatttattcaaattctttattaacagccgtcaatgctgcatgcaacacctgatccatgttgtaataacggtattggcctaaccgaccaccaaaaataacattatcagccttttcatcagctaacttggtatattgcttgtaaagatcgttattccgttgattgttaatcggatagtatggttcatcaccacggtgccagtcagcagggtattcacgagtgatgatcgttttatccttatcacccttgccgaactcaaagtgtttatgttcaataatccgtgtgtatggtgtttcggcatcggtatagttaattaccgcgttaccttgatagttatcaacattcttttcttcagtctcaaaacgtaaacttcggtactgtaactcacccaattgataatcaaagaactggtcaatcatcccagtaaatactattttcggataatcttcaaggtacttagccttttgatcaaagaagtcaacaccagtctcaacatcaattaagtcactatcaagcatcttctcaacgatctgagtgtaacctccaattggaatcccttggtaggtatcattaaagtagttgttatcatagaccaaacggactggcaggcgtcgaatgataaaagctggcaactcggtagccttttgtccccattgcttttcggtatagcctttgatcaacttttcatagatatcacgaccaataagtgaaatagcttgttcttcaaggttctttggttccttgccagccattgcttgtcgttgctcattaatcttagccattgcttcttctggcgtacgaactccccacatttcactgaacgtattcatattaaatggcaggttatacatatgccccttgtagttagccacaggactattcgtatagcggttaaattccgcaaattgattaacgtattcccaaacttctttattagatgtatggaaaatatgggcaccatattggtggacttgaattccgtctacttcctttgtatagatattaccagcgatgtgatcgcgcttttcaattaccttaacgcgcttacctcgcttagcagcttcgtaggcaaaagtagcaccaaaaagtccagcacctactactagatagtcataattattcatattcctacgacccaactttcataattttttctactgctttattaaaatttaataaatacacctcaggcataaatttttttgaagttttttgaatcattaatggtgtaggcatttttttattatcaataattttttgtattatttttgttaattttttactattccctgatggataaagttctccattataattattaattatatcttcagggcctgtactaatatcagcactaatgcaataaactccgtgagagatagcttcgcaaagaaccattggtaatccttcatatttagaagttaatattagtgcagttgctctatttattacagaccatggctttttaacaaagccatgccatattatatttttatctactcccaattttcttgcatactcttttactggcgtcgcttgagcagtattcccatatatatctagttttagctccccttttacaccagataatgcatttaataattctcgtaaatttttttggccatctagcattactctaccaatataaagaaaatgtggagtgctttgtggcctgttaatcaaacgtaaattagttgttatcggattaaaaattaagaaaatcctatttgaactaattccacgttttttaagctgttcttttatcccagaactaatagctaaatagtaatctgcagagtttaaaaatatatgcttaataggcttttgatcaatcgaatagtgataccaggcaatcacaggtgtcttcctttttaatagctttaaactctttttggctaaataccaaatcactggattagttgatataacaaaatcaggattttcttttctcaaatagttaaagatattaagcggcataatcgttaacgcatataaatcacgtaaaaatcttcgcttactaatccacttaatatctatttttacgttttctgcccagctataatcaaagcttccaccaatagagtatacttttaactcaaaagcttgttctgacattaaacgtgccttaaacaaattttttataaccgtttctgttccaccaaatccagtcataaatggtacaattatgatcccttttttcataaaaattccctttaccaaataattgcttcgatgtttgcaatagctttttttatatgattaccatttcttaaatcatttgaaaaagataacgcatttttcttgactaaactaaaatcactctgggttatactacttaataaccctggtaattcataaaggctactaatagtatatcctagcttatttttagaaataatgcttgctatcgcagctttattccaaacaataattggaatacccgtacttaaataaagtgatgccttatgtggacaattatactgtaaatattcaccatacattccattgcactcttcagcactagagccatcccaaatcaaaccaaagttttctgttaaatgggcaggcaattcttcaggagaataaactcccttatatttaacatcgttatccgtcactccactaaaatttggtccataaacatccaatgaaatctttgctggaactttagacaaaaattgagccttttttaaatttccagcaaaacaaagtgtctttgtatattgataattattgttaacagattgaggatttaaataatcaaataatcctaatataaccatcggagttgtaattccattatctttaatccactttgccattgtattattatgaactatcaggccatcaacttgttttaaccaattaatttcctccggtttatacgttggatcatccttataagatcttagagattctaaatcatgaataatcaaaattaattttgcctttgtataagcacgaatatctctaataaacgcattcattaaggctcgtgaataggttggaaattgaaagaaaatttcatctgcttgtaaatttttcattaatctaggaatattccaattgatatatttaaattttaataattttgaatgccagttaaatcttaaattaattacttgaaatccctcttttttttaaaatcttatcaatatctgttttagctttaggaccagcattatttttatcaatttcattaacagaaataattactctctttttttcattaggcacttttttgaacctactttcattttgaattaaattctttagacgtaataaaaacaaaggaaataattaaaccaactaagccccccaaggcaactccgacagctacatgcttttttattgaaggagatgtcttacttgaagtatcacttttcgttgctttatcaacaattcttacattttctacacctggctgtaccttaggcaattctttgacaaaggctttagcagatgcatttgcgattgttacagaatcttctttggattttgtagttgcttctaatgtaagtactaatgattgtggttgagttttagcatcaatcgcactatttatatcattttgtgaataatcttttttcatttttgaagaaagatactgccgagcttctttagaaacagtcatattctttgcaatttcttcatatgttggcatcatatttaaatctgcattgacaatattgtcctgactcttattatcattaatctttaagtcatgggaaatgacaatattagttttagcagtatacgttgttgattgatgtctttttgcacgaatccccattattcctcctccaaggatcgccaaaactataattataagtaaactcttccaaaaatttctatataaagtttcagatttcacgattttcctccaataatgttcttagacttgtcttttgcataaacctctgctaatagcgcgatcaaaaacggatcataactaacatcaagaagcctttgttctacaactgcgctaatggatataactactaaaactgtcgcaagagcatatttctcattgctaattgaccgaaacgagataaacgtcattattcctaaaacaattaaaagtgcaattattccatataaaatcataatccgaatatatgatgagtcaataaaaaaatatttactttgatttgtcataaacattctcatcccagttgttcctccccaactgtgttcaaccatatgttgcccaaagatggaaaaaccatactgctcaaatcccttttttccaagagctaacctaccggataataagctatttatcttttctagaattaaattagatttattgtagaagtaggttattaaaaaaattatatatgctgataatattggaactgaccagtagtaattagctatcttttttgcaaacttctttcctcgttgtgacgctttacctattatcataacaggaattaataataggagtgatacggcacttaaacgagcatcacaaaagtaaataagtagatatgcaagtaaacaaaatacaaaatagctttttattgatattttctcaaagaataaataacagtatgctaaaacaaaatataaaacatgtgcagcaaagtctgttgggtaaacaacaccaaatgattgtctaattgttccagtggtttgtcctctgcgataaaccaaattctgaattacaccggttaatgagctgaatacagcaagtgttaatataattattcctacataaaagtacaaataaataattctatcaaagtttactcctctagcaccaagaataaaaattcccattgaaaatagcataaaatctgaggaagttcgccatgtaagtactaaaaagcctaaaacaaatatatctataaggaaattttttattgtttgttgatcaataaaaaataatttaaaaattatcatccccaatgcaatatacgaaaacatatgaaacgtatttttagcgaaaaaatccataaaagttgtaaattgtaagaaaaaatcagtgaaataaaatacaaatgcaacttcataaattaattggccatttatatagaatttatttatttttaaattattcactcaattatggtctcctctcctaatacgcgccatcacgcttaaaaatactaataatgttcttaaacattatctttgtatcaaaagcaagtgaagccttatcaacatactctaactcgacatcacagcgttctggatatggaatgttgctccgaccactcgattgccacaatcccattgcacctggttttactgataaaaacttatcaacccgatcaccatattcttcaagttctttttttacaataggtcgggggccaataatgctcatctcgccacgcaagatattgataaactgtggaatttcatcaattgatgtttttcgtaaccaccgacctaaacgggtaatccgtgggtcttcttctggctccagtttatagttattggcaacatatttagcatacatttctggatcattttctaaaatcttatccgcattcacaatcattgaccgaaacttataaatcttaaatggtttgccatgccaaccaattcgttcctgcttataaaataatggacctttgttatcaccaaaccgattcattataaaaatagtcagaaagactggactaaaaccaatcattgctaatgacgacagcgtaatatcaaagaaccttttccagaaaaggtatccctttgattgttgtttaatttttaccttctcattcatgattctcaaccctactttttctctttaataatatatattggccgtttcttggtctgcatatagatccgaccaatataacgacctactattccgaggcaaagtaactggataccacccaggaataaaataatacaaaccattgaagcccagccaaaagcactactagcaggctcaataatctttcttattataacaataatcatcccgataatggagataaatgccgttaatccgccagcccaggtagcaattgctaagggagcttctgaaaaatcggtaatgccgtcaatcgcatacttaaataacttccaggtcgaccaatctgttgttccagccacccgttcgacatttttatagggaaggtacttggtcttaaacccaacccagttaaaaataccttttgagaaccggttatattcagttaatgacaacaccgcatcgaccatctggcgggtcatcattcggtagtcacgggttccagagacaattttagtatcagaaattttattgataacattataaaactggttagaaaggaaggacttaaactttgcctcaccttttcgatctgtccgccgcatccccacgcaatcatattcacccttagaaatatcctgatacatctctggtaaatactctggcgggtcttgtaaatcagcgtccatcacaacgacataatcacctgttgcgacctgtaagccggcataaagccctgcttctttaccaaaattccgtgaaaaagaaacataatgaacccgttctggatcttgtgcgtgcagcttgcgtagttctgctaaagtgtcatcactcgatccatcattgacaaaccaatattccgtttctactggcatctgtttaactactttttcaactgctgggtaaaaaagtggaatagtttcttcctcattataacaaggaacaactattgacaattttggcattcttgtctctccaatcgttaatgttcaccatgaccggtgactttacgttttaagaacttcacaatctttaatggccagttttgcttttcaagaaatacccggttaacttccactgtcttgtattgcggattagtcaacaaccaagtatctagtaaaagctcactcaaaaagccaaagacccgttgctcatatggtgtgtagtcagaataatcaacttttttctcaacttcgcctaaaacatcaaacagccaggtacaatattcatccaacggctgcttcttcataatcatcatgttgaaataatgagccgatgtctgtttcattactttttcaaaagcaggtaagtagtggggatatttatcctttaacacctgccgcgtaatttcaagcggctcgtgctcatgaacatggaggtaatgggattcatttgtttcaatgtaatagtgccgcttctttggcaagattacatcggcatcttttaataactcttcaacttgtccatgattgaggatggtcgaaagatcctttgagtgtcccagcgtcaagtaacgacggtagtggactaatcctaatgcatccacatcatcaagatttttccatccccagtacaaagctgttagctcattgtaatgcggattcttttttgaaatattatctccggtattatcaccctgaaatgtatgattaacagtcgggtgaatctctttaccaacaaaaactggtaaatacattggatcatctggcatccgataatttttatggacagccactaagattttaatattcactattgtactcctaattattgtttttaaacataatcattaaaataataccagtaattcccaatcttggaaagttattattggaaatcctgcgcagctagccagctctgcacgtcatccagatcaaagcccttgcgatacattgtctgcttaaaatgctgctcacgctcgtatccttgataacggagagcacgacgccattgcttcgctgcttcttttgctaaaaggtcgttctcttgctccagatcaggttgtggaacaacttcatccttaatcatttcatacacactactagagaagccttttgtcatgagcccctgttgtaccttttgttctcgtcgccgctctggctggttccgataacggcgaaatagttttacagctaacttctttgctaattctgcttgaacttcgggagtaaattgcgttaaagcatcatcaatatcgttttcgccaatccctttttgtcgtaagtgttgacgaattaccccaggccccttcaagtccgtgttaatcatcgtgcggacataagaagccgcataggcatgatcatcgattaactgttgaccccgcagctttttcaagattggctcaacaaactcttctggcgtatcaatttcttttagcttcttaacgatgtcgctttccgtccgcatctgataagaaaggtagtcaagcattcgtgaataagcctttgcttgctggtcagcagtcgcaatggccgcaatttgcttttcatctagctcagttcccttcatcaaacgaaactgaatcaaaacactttctgcaaccggaaaagcatacttaccatcaaggtatatattatatcgacccttccgtttttgcgtctcaattttcgaaatttttgccatttttaaatttctccttaacattctcaatttttaatcgtttataaaggtgtaagcagtggccgctacttaacaaatcaaattaaacaaaggaagtttttatcatgcaaatggttcgtaatttcaaatccgctaaaattcagcttaccctcaccaacagtgaacatcccaagggcgttaaacatccctttaacaacattattgaggatgtcactaatgagcaggtagcacaatttagtgcggcaattgaaatacttactgctgaaagatgccttgatacagacattatcgttactagtcaagttgcaatgaacaactaatttcaaggaggaaattaatttatgcgtacattaagcttaactttcaagggtagtcttggtaaaaaacattcattaaagttgaactatgccagtggtgatctcgatgccgaaaccgttcggaaggcaatgcaagaaattgcgcaaacccacctctttactaaggaaggcgaagatatttatcagcaacctctttctgcaaaatacattgatactgtttctaccgttatctttaacgacgagcaaaagtaattaaatatcgagttctaaagatcttcaacatttggaggctaggaaaaattcctagcctccatttttgtttgtactctttctttctaccagttgccaaaagtgtttcttggcatgcaactcaccttcatgacattcttgtagagcagcatttagcgccgcccccagcatgatgatatagccagaaaagtcaagccataccatcatggcaataaaagctccaattgtcttgtaggaaattaccccgtgactaaataataaggtatagaacgagaataaacgtgataatcccatccataacaaagacgccaagaatgacccagcaagtgcatagcgcaaccgaaccttcgcattaggaacaaagtaatacaaaagagcaagagcaataaacaagacgccaaatgttactggccaccttaatgagctaaacaataaaatgtagtcacgccgaaaattaaaaatcggctgaatactctttaggacttgttcaccaaaaccgtacaaaataataataataaaaataattaccaataatacaatcatccaaataaacgagacgattcggttcatcaccggattctgattttccgcaatcccatacgcatgattaacgctgcgttgaaaagcggcaatcccctgactggtcgaccaaagagcaatcaaggccccagttgtcagaacaccaccactcccccgtcgtaagaaatcataaatcaacggctggataaaatcatagaccgattcaggaattgcagttgagaggtaggctaaaatcgtcttagcgtcaattccaatcatcggtaataaatttcctactaccatcacggcgggaaaaatagataataaggtatagtaagctaagacagcagcagaacttgaaatctgggccattgtaatatgttggattaataacgcaataaaagtcttccctttgcccggttccttgtccataataacctccgaaaacattttataggtttaattataacaaactgaacacccgacaaatattacagaatagataaaaaagcggctgggagaaaacttttgttttctctcagcctcaattacttattatgaataatagtaagataacgtggaactagcttcgcgtcgccacaaggctcgagtctaagtacgaacgataatcagcccgtgccgtgctaatcatcgttccagcttagcccaccgccttgtcgagaaggttatttcccacttccttttttatcaattacccttcaacatggtgacgctttgcggaaatttgatagaagaccaacgcaacgattgcaaagaagattggtccagcaagtgtccagaaagctgtttgataatctttttgtaatagtggttgaacaaacgtaaagacgattccgacaattaaaatcaattcaacgaaacatactaatacatctgtccagaaacggttcttaaagacaacgaatggccggtcaaggtccttctttgccttaaagaatgggaaagccccgatcaagaaaacatatgggaaacaagttgaaacgttcgccatatcagtcaaaatcaagtagaactgttgagcagcatttccaccaaaggcaaccaagaaaacaataattgaaacaataattgcttgaagccacattacatttgcaggcatccccgccttgttaagtttcgtaagtttctttggccataattctggattagaaccaagaatgaaggccttgattggggagtaaagcagaataaacaacgcgcccaaaaagccaagggtctgtgcaaaggcaacgatccgcgtcatgataagtccaaaagtaagggcagcaccgtgcgaccatccaagcgtatcccccatggtaacccctaattgattaaagacaacataggtaacattaccaaggttaacgctgctcttagtcaaagtttgttgataatttactgaccaaccgagcatgaaaatcattaagacataagtaccaattgtaaagatacttgcgatgatcaatccacgagggaatgtcttttccggatttttcatactatcagtaacagaccctaatgattccattccaccgtaagcaaaaatagcataaacaacaaacgaaataatggcaattggtgtctggaattgtggattaggtgatgtaatgaaagttgaagcaccatgaattggttgctttaagattcccttatcggcaactaaaacaataacactgacaataacaaagataatgttaacaacaattgtaaaaataccaccaagtgaaccaactttagcaatggcggtcattccccgtgaactgcaccaagttgttccaagaatcaacagaatcccaaggaccccaatcaattgagtcgaagtcagaccaaatgcatgccattgttgggtagtatccttaccaaaaagcaacgcagaaaaagtaatccaaatccgtgatgctgttgataccatccatacaatccaagatgctagccatacgaaagtaccgacaaaggcgattcgttcaccaactgaaccggcaagccaggaataaatgccccctttagcatccttaaatgtggaaccgtactctgccatcatcaagccacagggaaagaagaaacaaatccctgctaatgcgtaccaaataatactaccgtaacccatttgtaagtaggcgtttgaaacattcccaaaaccaaaaatggcggtaatgatcatcgtcactagtccaaaggtagtaatcatctttttattactactctgttcgtccaaaataatgcctccaaagctttaaaattcttaaataaaaataagaaattatttaataattattagtatagtcgtcttttaaaaaataaaagtcttttaaataatttcacattacttttatactaccttttgtatttttacgccaacttagcaatctttattcgtttatttgtatattttgttataagcgatgtatactattttcattacttaataatcgctttcacatttaatcttaatgctatggatagcgttttccgacgctgctataattgagttaagaaaatttatgtgattttcactctaatatataagatcgtgaggtggagtaaatgagtgagaaaaaaggtattaatacgacggaactaacccttttaatcgtgggatcaacaattggttcgggagtatttggaattaccagtgatttagctaccgcggcggctcccggaccagcaatcattgcctggataatagtagggattggcgtcttgactttagttctctccctaactaatctttcgcaaaagcggccaggccttgattcagggattttcagctatgcggcagctgcttttggtccgctgggcgaatttatttctggttgggcatactggctttcagcgtggctcggcaatattgcttttgcgacgattatgatgagcgcccttggaacgtttttccccagcctatttgccaatggtcaaaacttattctcaattattgttgcaattattttaacctgggttttgacattcttggtaaatcgagggatcgaatcagcggctttcatcaattcaattgggacaatctgcaagattattccattagtcgtctttgttatctgtgtgattcttggttttaaagctaagatttttactgctgatttctggggcaatgtaacacagaatctcagttcaaaaatcgaaactggttcaatctatgaccaagtaaaggcctcaattatggtaatgatgtggctatttgtcggcgttgaaggtgcctcggttctttctagtcgtgccaaaacacggactgatgctgaacgggcttccatcttcggtcttgtaagcctactcgttatctacattgtggtttctattctgccatacggggtaatgacccgcgcccagttagcagctggtggtcaaccggcgcttggggcgatcatgcaacatctggttggaacgtggggtgccgcccttatcagcattggattgatcatctcagttttagtttcatggctctcgtggacaatgctaccagctgaatcattaatgctaatggctgatgatgaaacccttccaacatcatggggtaagctaaatgacaaaaaagcgccaacacaggcattaataatcaccggggttcttcaatcaatcttcctcttctctttacttttcactacctatgcttacaactttgcatatacgctttgtacggctgcgattttgatctgttacctccttgttggcatttaccagatgatgtacagttggcaacaccaagaatggggacaatttgttattggactaatcaccactctctttgaactgatggcaatggttctctctggctggaaagaaataatggtcgtttcagtcggttttattcctggattcttcttttacgtccaagcatgcaaggaattccatcactcaatcacagtaaaggaaaaatgggcaatggggattatcgctgtctttgcggttatttctttagtattagtaatcaacggaacaatttcaattaattaaaggaggaaaagatcatggtagaaatagcacattttggtgtcgaagcatggctaaataagtgggaaaagagcgcgacttatgatatttcacaaagtacaatcgcctctttgagtatgcacgatctcttaaatttagatggtaacaatggtgaagagttttatgagatgcttgataagcagcaaatgaactacgggtggattgaaggatcacccgagttcaaagaagaagttgctaaactatatcatcatgttgatccggaaaatatcttgcaaacaaacggtgccacaggagcaaatattttagctctctatgccttgatcaatcccggtgatcatgtaattgccgaatacccttcttaccaacaactctacgacattcctaaatcattaggtgcagatgttgattactggcatattcatgaagaagataactggtacccacgaatcgatgacctaaaagcgatggtcaaacctaatactaaaatgatttgtctaaacaacgcaaataatccaacgggaacggttcttgataaagagtttctcgaacaagttgttgaaattgctaagtcagtcgatgcttatgttcttgttgatgaagtctacttgcccctcgatcaccccgaaaaatttgcgcagattattgatctttacgataaaggaatctctactaattctctttcgaagacttattcagttccaggagttcgaatcggttggaccgcgactaacgctgaagttgccgatatcttccgtaagttccgtgactacaccatgatctgtggaggagtctttaacgaccagctcgccacctatgttttacgtcatcgtgatcaagttctcgcccggaaccggaaattagttcttggcaacctcgccatttataaggattggattgatcatgaagaccgagcaagtgtcatcatgccacaagcagtctctacttcctttccaaagcttgacgtgccggttgatattcataccttctgtgaaaacttacttcatgacgaaggggttctcctcgtgcccggcgatgcttttgatactccaggtcacgttcgcctcggctactgcgcaccagaggcaactttaaaagaaggcttaaagcggctttcaaagtatatgcatcaatatgattagcgttacaaaaaaggatgttagaaacatgcaaaagttttctaacatcctttttactgctagcgattaattttcaaactgcttagcaaccttttctgcgatctcacggtaatggtctaagtacttagcataattatcatcgtacatgtaatcagcatctgcttctggatcttgagacgtcaaaatcttcggaccatcattcgtaataactaaggtatgttcgtattggcaactccaaccaccatcagcagtcttggcaagccaaccacttggatcactggtatcagcttcccaagtaccagtgttaatcattggttcaacagtaatggtcatcccgttacgaagacggattccttgaccgtgttcgccgtaatgaggcaccattggatcttcatgcatcgttggttgaataccgtgaccaacaaattcacggacatccccatagccattctcatcttctgtgtagtgttgaatcaccgcaccaatatcaccaatccggttaccaggaacacattggtcaattcccataaacagtgacttcttagtaacgtccattaacttttggatttcaggggaaacttctcctaccgcatagctccagcaagaatcactgaaagcaccgtcgacactgacaaccgtatcaacctttactaagtcgcccttctttaagattaacttcttacgagggaacccgtgacaaatttcatcattaacactaacacaggtagcgtacttgtatccttcaaagccaatttgttcagcttttgctccagcagccttgaagtacttccgagcgaattcttcgatcttccaacttgagatgcctggcttaataattttacgaaggccaaggtgcattgctgctaaggctgccccggccttttccattgcatcgatttctcgaggtgattttaaactaatcattttcgcgatctccttatttacaatctaacataaatagtataccacttgtctgccctgatatcgcaaaccgtgctatactatatgaacgttatagatttaatggaggttataaaatggcaaaagcacttgtagtatacgcaaccattaccggtaataatgaagacgttgcggacattattactgacgctcttgaaaatttaggagtagaagtcgatgaagttgaaatgacaatggctgatccagctgactttgaagaagctgatatttgtgtgatctgtccttacacttacgatgagggagctcttccagaagaaggaattgacttttatgaagacttgcaagaagaacaactagcaggcaaagtttacggagttgccggctctggtgatactttctatggggatgacttctgtgtcgccgtcgataaatttggggatgcccttgccaagacaggggcaactaagggcgctgaaaatgttaaaatcaacctcgcaccagatgaagaagacattcaaaagctcgatgccttcgctaagcaattagtagaaaaggcggctaaactgaatgattaaggatctgtgggtaaaatataagtcaatcattgcctaccttttctggggcgttgtcacaacggtggttaacttagcagtattccagattttgagtccgggacttcactggaatgttgcccttgcaactgtaattgcgtggtttgcatccgtattagttgcttattttaccaataaagtctgggtatttggttcccattacactaccgttagtgactttattgttgaaattttccgatttttcttttatcgtggattgactttatttatcgatttaataattacgtatgtaggtatcaaagttttgaaattcgatacacctctccaacaatttatcgttaaatttattgataatgtcattgtggtaattgctaattatattttctcaaagtggttaatcttcaaagataaccgtgatattgcagataaataaatgataggattcggactgtaaacttacagtgcgaattttttatttatcttaaaaattccaactataataaatacgaagaaggtattgacctaaaatgatgaaaaaattcctaccaattgaaaaaatattagaagcttatacagcaattgctgacggtcacgttaaacttgaaaacgatcaagcactcgtaacctcttctaatgaagcgaaaacttataccgtcaccctttcacgacaatacctatacttcaaatgacaatgcctcatactggcaaggctatcttggctatcccggaattgctgtcctgatgcttcaaggaaagttaccttatgataaggaattagctcaacaatttgctggagttgattggaataaaatcaatcaagaatataagcgtaattatgcgcaagctgctgatgctgttatgactgttaaaggaattgataagaagaaagcagagacggaacttcatcatgtttacaatgtcctaaagcaattaccaattatcgttaaacgtggatcattacgatcacctaaagcaaactaaaggtgaataagagactactcttttacataaaaagctctcttattcaccttttttattgttgtgataagtatttttcaacaattttaagaatcttttcgcttgcgtgcccatctccaaatggtacttccgctagttccatttgccgatacttcttctcatcatttaacaattcaaaaaccgcttgttgaatcgttgtcggatcagtaccaacaatttttacgccccctaggctgaccgcttcttgacgttctgtttcatcacgtaaaagcaaaagagggcgatgcaatgctggagcttcttcctgcaaaccgcctgaatcagttaacagaatcgaactccgggcagcaatatttaagaaatcatgatgatttaatggtgtaataagatgaatccggtcatgatctcctaaaatatcattagccagtaattcttcttctggatgaggatagacaggaaatatcaggtcaagattgttgttagtttccacaatatcacgcattgtatggaaaacacgcttcatgggggcgccgaggttatctttgcgccgcattgtcattaataaaatccgattatctgctgggatggactgcagtaaaggatgcgtaaaatcttcttgtaaattatgcttcacgctatcaattgaagtatttccagtaacatagattcgttttgctggatggtgctcttgcaataaattatcgcgggcacttgtcgttggcgcaaaataaaggtctgctagattatctgtaaggcgccgatgcatttcatcagggaatggcgaataccgttcataagtacgcaaaccagcttcaacatggccaagtgaaatatgatgataaaaactaatcaaactggcagccaaacttgtagtagcatcaccagccacaaggatcatatctggttgtccagcattaatcacattatttaagttatgcaacagttggctcaatagttcaacttcatttgtacttgttacgttcgatgaatcaacactgaaatcaatttggaaattcaaatatgccaacgtgtcgtttaataattgtgaatttcccgttgcaacaagaactggttgccaggtcgcaggattttgatgcatcaatctaatgatcggcgccaacttcaaaacctcagcccgcgtaccaaacaaaaacataatcttatatggtggctgcattaatgactctcccttcagcttttaataaaaaagacgtaatcactaaacaaagcaatcacgtcgacagtgcattatcaaatggtcccatccggatttgaaccggaatcgaccgcttaggaggcggatgtactatccaattatactataggaccaaactaaagaatattatcgcatttacgaaggatttcgtaaagacggtaattattcttttttagttttcgttatttttacgacgatgcttcaaacgaattcctttatttttgcgattctttttctttcgccgtttctttggcttagagaatccactgagagtttgattcatctttttatgggtttccccacttaattgttctttttgcaagtgacgactagcctgctgtttgattgaaaccacccgttgaccctcttctggtttctggttggttaatttattatcaccaatgtagagcttagttagttcatagtcactatcagcaagcaacttcttaaggtcacgaatatcatgatcatcacctaaactaagtgctaatcctggttctccttgtcgcccagtacggccaacccgatgaatataggtattgagcgatgtcggcaagtcaaagttaataacggcaggcaatttaggaatatcaatgccccgggctgccaaatccgtcgtcaacaacaacttgatttgccgcttccgaaacatccgcatcgctttttcccgttgtacttgtttttgtctaccgcccaaggtatctaccggaacatgttcgtgtcgcaaccgacttgcagcatagttaagggtgcgggtactgttgaagaagataagcgcccgaaaatctttaatacttgtcagccgacgtaaagttgctgttttttgcgcattggttcgtgcacttaagtaaccatgttctaccggtccctgagaagtatcctcatcacgaacatcaatagtttcaatatcgcgaccaaacatcacattcaattcatccagaacaggagattttgtagcagaaaagaatgctagttgagtagataacggggtcgcacgctcaatatcttctacgacagctaaagtatcgtcttgaagcatgtcatcagcttcatcaataaccattgtcattaaatggccgagttttaagtgatggttatcaagcatatggagtacccgtccaggtgtccctactacgacatcagggtgttggtgtaaattcataacttgtcgccgtaaatttgcccccctgtcagggattgaacgctaacgccaattaaagttgcccattcacggattaccttggttgtttgaattgccaattcttgtgaaggtgcgagaaccaataattgagttccctcgcctggcataatcttaggcaagagtggcaacgtaaaggctagggtcttaccagagccagtcggtgctattccaaggacagattggtcagtttttaatgccggcgcaactgctttttggattgcagttggttgcttgtatttttcatcaaagtgtttttgaaattgttcgatcaaattaaatcatcctattcttgatcgttatcagatgggaaaactagttgagcagattgacgaagggagtacataactgagttgaccgtcttagataattctaaccaatgcttgtacttcttcatttcttcttcatcatcaggattgttaaagaggtctgcgaaatcattcatttcatcagtcattgagttttcttcaacgggcgcttcgattgggtgcgcattttggtcagcatcataataagtaacctttcgcgtatcaaaaatactatcaaagactaaagtatctttcaagccgtaaacttcagaataaaggtgggagttagctgtcttaccaaagttgagagtgacagtaaatttgtcatagttaagaattgcaacccctttaccatcaaccccagttttagtcagagttgggaaataaactacagattctggttcaccgtaaatagtaacggccccatatacagcatatacaccgaggtccattaaagctcccccagcatacttaagggtaaaaatatttggatatggttcactgccattaagaactttatcaaaacgtgatgagtatttcattacagtgatggttgctccttgaatataatgttccttcatctcatcaactttcttcaaggcagcttgataaatcttggtatggatatgacgagctgcttcaaccaaacgtgccttaggatgggctgccaataatgattcaatcgcactgtattcacttggatttacgaaagctggcttttcaacaataataaatttatcgttttcaattgctttccgtgcttgttggtagtgcaaactatttggtgaagcaatataaacgacatcaaaatcgccctcttcaaagaacttatcaatgttatcgtaaaattcagttgccccatatggcttgccaaacttctcagcatgttctaatgtccgagaatagacagctgtcaattcatattttcctgttttcttggctgcatctaacatctgatcagtaataatatttgttccaataacaccaagttttaacataaaatcaactcttccttttcaaatatttctttgcttacatctaattttaacaattattgcgcgtttttaacagaaatgaaatcttctgataatagaaatgtgtgtataattagttatgttatagaatgacttatcacttaattgaggagactgataaaatatgagaaaaaaaggaatgttacttttcggcgcgggactaatggctggactcaccagtactttagggttcagtcgtgcgaagaaaagcaataatacgatctcgttacctatcttttatgcgggcacatggcaatattatgataaagaacgagatcgctctcataaaataaccatctctcctgaattaaagctcggtatcgataaccagatcattccggcaacggttcaacaaatcaaacctgataagttagttttccttgatcgatttggttatcacattactattcgggcaaatgaacaacggccagtttcattaaccgatgaagctgatgaccaagtttatactattcaaccattaaaataatgttggcgctgtaagacagcgttttttatttttaaattatttttgagcgtactgacgatgtgccggtgctttataattttgcataaatgccaaaatctggtcaaactggtcactaaaacagatactatttagataaggatcttctacaaagcccgccttattcatttgcttaaataggtcgtttaacgaatcataaaagccattaaagttgtaaaaagcaactggcttatgattatccccaactgttgtccatgaggcggcttcggtaatttcctctagtgtcccaaagccgccgggaaaagctaataacccatccgcaagatccatcatcgtttgcttgcgaatatccatattagggacaattcttacatcttttaattcgttataaatggctccacgttcagctagctcagtagttattaccccgtgaacaacgccgccattttttaagactgtccgagcaagggttcccatcaagccaaacgcaccggcaccataaactaattcaatatcgtgttggaccagccattcaccaaatcgttgtgcttcatgattaaatgccggattatttccatcacgcgcaccacaataaactgcaattcgtttaatcatacaactactcccctttaatattttttagagaatctaattgatgcttaattgttgctgccgcactcttaatctcttcttcttccaatgggtaaagttttaagagaagaaggttgccaattccttgccgaccaattaacgctggaaaactaatgtaagtggaatactgcggctgataaattgcaaccggcaacgctaattgttcatccgcaaaaattgccgtaataattcggagagtccaagcagtaacagcactaacattgtaccctaatccatcgagagtgtaccaattactaaggttcgccttaattttaagctgactttgatctaagtgatgaccattgattgccgcagttaagggttgtccattcacacgaacagttgaccaagcaaatacctgatgaccatcgtgttgaccatagacaaaaccagttacattggcagcggcgacctttgcggcttctgcaattgcccgataaaggcgcgccgtttcaacaaccgtgccaatcccaattacttgcttttgcggcaagccaactttttgctggagaacagcagtaattgcctcattaggattagtaaggttgattaagatcccactaaaatcactcttaaaaatcttattaccaacttgtaaggcctgctgatagctggtctcaagctcagccattggttgttgcttcatcaaagcactctttccaaaggcggtaataaggatatccgcatcggctaaggcagcgtaatcttgaataattatttttgtgtgggtcgccaagaccgtttgggaatcatttaaatcagtctgaattgcaatagctagttgatctttttcatcaatcaaaactaattcatcaactcttccgttcattactaattggttggctagcatttcacccacatgaccgaggccaataattccaatctttctcatttttagcgcttctttctatttcccgggaaataacgaaagtgaaaacaaggttattaccctactttaaaaagatagagactaggaaataatctcctcagtctcttttttacttttcctgaaaatcctgaacttctggaaaatcactaagaattacatcacgggcaccctttgagaaatcaaaagttgcttgagcattatagctttcttgatgatctcctacatataatactacttgcgttggttgcaagtctatttggacacctaactcaatggcagctttaaccaattgttgaacatcatctgagtaaacatcgctgattgcttgcaatggatgttggaaattaatatttttcgtgtaacgatcattggcaatttttaacccaaatgataataaatcaccattttcaagttgatctgctaactgaccgctaagagttagcgaaggatcatccactcgtcgttgtacaaacttcaaagcaagctggtattctcgcggagcattaaactcaacaataaagttttgcaactctgcgattaactgcattgcttcttcatgcatccacggtaattgttcctttggcttttgtaaggccactccattattccgcttttttgcttccgctaatcgttcctccaagttatcaggtaatggtgaaagaatactatttaaaagcattaattcaaggaagttaatcgtatcgtcactaattcctgttcgcgacaacgggtcaaggtcaaaattacgaaattcaagataatcaattcccttatgtaaggccccatcaatatcatgcatatcatggttatgccgccgtaaccgtaccgggccaaagaattccttcatactatagtaagtgccattgtccatgaagtgctttagttctgcaaaatactggtcgtatgaagtataggtaacttgctcattggtaaagttatcatccccataatcactacaacgcaaactccgaactggcagctccaaatcctctggaatactatgtggcatatcttcagaaaccggacttgctccatataagtacgtaaataaccattgataaaggtagaacttttgcgctaatttaaagtaaagatgattttgaaaatcaatacggtttggataccggtccgcataaaagcggtgataaatctcgttgattaattcaccatccaaactaaaattaacatggacatcccctaaaatttcttgaacaataccatatttcttccctagataatcatgagtctcttggtcccatttcttagtaaatgcagtttgtaaatattcaaggtcatgctgataagtcggtcctggcgccatacttaacggccataatcgttcatcactccgtaaatgtgagataacaatctgctctaacatttttagttgccggactgcatttttagctccaacaactggacccgtttcaaagtccatcatgtcatccgtatagcctgagttcaaataaatattatattgccgtgaacgcagattttcaggatatggataacgacttgcccgcccattggtcaaaattcggtgcttctttgcctctaaaccaaactgtgaagaaaaaagtttggcatttaatgacggttcttttaaagctgctttaagttgatcataatcggttcccatccaagaatccctccaatcaatcattttaattttattcaagttcaaccataacacgtttggaacataatagacaataacaacttaattatttcactggataatcacttcaaaatagattaacgctttctgtccttaattataccaatctccgccaccaaggaacataaaagtgctgaaatgctttattcttagcaaagaaatgattaattccgctatttttacactgatgttcttttaatgaattgacataatcagcataaacttctattcgctgcgaatctggaacgccccgccatgcgataacatcctgcatattttttactaagtcagcataattaccgccatcatcataatcaataggtgcctgccaatattttttagcaacccttcgaagctgactatcggtcggttgagtaatatcaagacgttgatgagtgtgacgatatttaccagttacataatactccccatagggaattccatagttaaaagattctgtatcagcgatttgccgtaattgattggtcgaataatgcgtggggtctgaatcaactcttccttggttatcaaagcgataaatattccattgactaacaaactttcctgtttcgatatcaacaataaattcaatcattcgggctggattagcataccgacgatacgaattacgaactaattgaaccttcatattagaggggtaagcaaatttatgatgataacgattatggtaattagcaccagttttaaagtctaatttaaagtgattatcgtgggcataggaaagcaatcgttgaaaatctgtcgcttctggtgaaagagagggacgctgatattggcgaataaaagtgatgttttgccgatcaagataactgcgaaataaatgaattttgcgtcctaacaaatctgcttttagccctttcttccctgaataagccgtcacaactagatcacgaaaataaggatagaaaaaactggtaggggctaactgaggtgaaaattgatatacagttggtgaaaattgaagaaatccatagttatcaatataagcttgtaaatggtgattaataattaaatcaagctgttcatgagcgttaagaccgctttgtttcaaggttcttatataattaacggaaccaatttgatttgcttttatcatgttatttgtcataaatatcatttaacggttcatgaaccatcgtaatatgctcgcgctcggcctccataaaatggtcacccacagattcaaaaccatattttttgtaaaagtcctcaacataggcttgggcatgaatagttatcttaaagttggggaaattcactttgattccacttaataaatgttcaataatctttccacctaaaccaatcccgcgtgcttgtggagccacaactacgcgaccaaaagttacaacatcattctgaataaaataacgtgcataggcaactacttcaccattagtagttgcaaaaacatggtgcgcaagtgggtcactatcatccggatcaggataggaactctgttgttctccattaaaaacttgtgctcgtaacttaagaatggcaaaaagttcattaactgttagttcagtaaattgtttatcaaaccattgcataatttatccctcctataattttatatattatacaaaaactagtaagttagcataattttcccgcaaagcaattttattattaaatttatggaatataataaaggtaaggatttatttatgaagggagcgttcaataatggataatttttcacctaatcgtcgaaacgttgttgatattaccgacttaaataagtttttaacaaaaatgtatggtttaatgaccctggcagtattgctttctgccttaaccgcttggctcgtaatgactgttttcgctcagcaatttactgcttttatggtcaataaccgctggggaatgtggttaattatcctcttgccaattatcctaacgtttgggattaattttaatgctacttgtagtcctggtctttgtctgttcctattaattttaacagcgatagtctacggaattacctttgcttttatcgcaggcgcttatgctggtactgatattgcaacagccttcgtttcctcagcgggtgtattcttaacaatggcgattattggtactttttctcaccgtgattttacgcgacttggttcttatgccagtgcggccttaatcggcttgattatcgccatgctggttaacttttttgtgcaaagtccaataattaattatctgctttcaatcgttgcggtaatcatttttacggcattaacagcttgggatgcacaacgaatgaaaaatatctataccgagtgtaatggtcaagtatcatccaatgggctagctgtccttggtgcattacagctttaccttgattttattaatctctttattagtttcttagacatttttggatcaagtaatgaaagttgaactactcccacttagctaaacctacggtttaatgcttgaagtgggagattctggaaacatcgcatacttaccctaccgattctgaacgaaccttcaagcagaggttacgactattagccaaggctcgtcccgagcctaactttatctatcggatagctaatcctttttgcaagatgacttgtgcagcgttaatatcacgatctaaatgtttaccacagtttggacaatcccactcacgtaccgctaaccattccgatttattcaatcctaaccgatgattattcttcccacaattagcacaaatttggctagtatatgacggattgacctgaataagctttttaccgtaccagtaacacttatattgcaatatatctactaattttgaccagctagcgttagcgattgctctagctaaatggtgattcttcatcattcccttagtattaagtttttccaacacaatgatgtcgtactttttgaccaatttagtagtgaatttttgtagctgatccaaccgttggttggcaatcttttgccgatacttcgccaccataatacgagctttctgataattcgtaaaatcgtctaattgccgtggaactaacactttattatgatgatcccaggcgatttcctgctgggcctttaagaaccgacgactacgcaatttctcccaacgatacaactttttacggtatttgtcttcaaaatgattgatcggttccttgcatccatctgaaagattaagtaatgacttaagtcctaaatcgccaccaatatatttacttgttttaggaagagtttggttttcgctttccactaaaacagtaatgtaatattgaccagcaacgttcagacgaacagtgacattcttaattttacccattggcaatcgaccagctctaaaatagacgataccgagttttggtaactttatatgatggcaatctaaaactttaatattgccattaacgtactttgaattgtagctctgagaatattttctggatttaaatcgagggaacttattttgacctttaaaaaagcgttgaaaagcatcagctaaattgcgattagcactttgcaaagcagttgattctgcttgtttcaaccaaggatactcaaccttaagttgtttcaacagattattcatcccaaaggcattcacaaatttagcttccggattattcttgcgccgttcaatttgcatattaagcatttgattccatacaaaacgaacacaaccgaaggtttgccagagctgatttcgttgtgctgaatttggatagatgcgcattttaacagcttttagaaccattattttctcccttgactttcaatatatcgttttacaacttctaaaagcgctccaccagtgctaattaagcaatatctttgtgtccaaaaggctgattcccaaagatattgcttgatttctggaaattgttttttgaccattctggagctagacgatttgtaatcatttaaaaatttagccatttccgtatgaggcgttgctctaaacaaaacatgtacgtggtcctgatcatgattccattcttgcaaattaatgccgtatgcttgtctcacaactacaaaacgatgtttaagatattcagatatttcatcgttaattacttttcgacgatacttaaccaccattaccaaatggtaattaggtaagtatactgaatgctgatttctatctaattctattgttatcaccacattttatagatatatactaaatatatcatagaacaaaagaaaaagcactaacgtgctttaagagagcgattcatcccctacttatagaagtgggggtattctcgcaaatttatggataaaatcaatagacaaaaaagtattaagagagtcattaagcatccctcctaatataaatataagatagattttaataactctccactattacacttttaatcgtctaaagtaattattttttcaaagcgaaacatttcattattagtatcatcctgagtttcatagttaagatctagatggctttggttataaaattctacagcagcaaagccacaacgattgatataaaaatgaatatttcgtttatcaaaatacggggtacatgtctcccaaagaactgtttgtggatatttctgctctaatgcagtccaaattttataaccaattcctttattttggtgtgcagtatcaacgtataaaaagtctaaatgattgtgatgtgtttgatcatcgatttgtacaattgcgccacccacaatctcatgatctacaaccgccttaaatccatgggcattatcacaagtaagagatacataaatatcttcagtcggtaatacatcttctaaggagctatcctgtacttgagctgcttgattaaacgaatctttcattgcaggaacaaaaattggtaaatctttttcattaagtggcataagcttaaaatccatcgttttacctcctaaaatacataaaactaaacaactaataatttaaggaattttaccatttgctgcaaatttttgaccacttattacatatacaatataagcggtgacaaatataatatacttagattagaaaggaagtgggaattatgaaagtaaactgtcatatcgaccctaatattgaagaggaacacctcgatttatttgtccgtgaaatgaatccccaaattaataacctcttaaaaggttttacaagtaccgaaccagtattatggtgttatgacgccgatcaaattatccccattaaattctcggatatctttgaactaactgtcgctaagactggtactaaaatttcaacaaaagatcatacctacttttatcgtgaacggttatcccacttcaaaagcaatcttccgaatgattttattgaagcatctgtcagcactatttttaattatcattaccttgatcaccttgagttattagataatggtttgatagatgcaattttaacaaatggtagccatattcagatttcgcgacgaaaaatcaaaaatttgaaagcgaggttaggactatgaaaaaatatgtcaaatatacgattggtttctcaggaattggtgttctaattggcttagcaatctctttagttttcaactatcttaacggcagtaccacttactacccatcatcccctaattttgttaaccaattcgctcatcccttaacggcgtaactgtttctgttattttatggatgctaattggctgtgtttttgggtttggcagtttaatttttgaatttaaaaattggtcactgctaaagaaaacgatcattaatttttgtgcttactatgctggctttgcgccattagcaatcctatgcggttggttcccattgacttggattaattttgccattttcacgcttatctttattgtaatttatgtcataatttggcttcttaattggtactcaataaaaaaagagattcgctcaattaatcagcaaatcaaaaagtagttttccctcacatttgattgtaataagcctggactaattcaacaaagttattaatattataagttgttccaaataacttacgagccgatgtcgaccaataagaaattgggtcttcatgatcagttccaccaagataacttgaaatcattgcatgggtccaaacagtgccaccaccatctttggttcctttcgtcacgggcaaattattctgttttaagatataggctgtatagtaagcagcattgccaagctggtttgcaaaagaagctgcggtatattcatgaggcatttcaaactggacaaaatatggattagcatatggccctgctccttctgccatatattttgtatccgcaatattaataatttgttgattatcaataaatgtatgaacaaacactctagttgaactataattttgcttcatgtaagatacttcactactaatcgttgaattttcattcccagtatcatgaattacgaccccacgaggatttccagatgaagtactatacccgcgttgttcaaatatacttgaaatttgtttagtaattttagcgtgtggaagaccagattgagtaaggtaactattgatttcgttattcattttcaactcaatatcggtggcccgaacaaaataattttttccattatagttaatccgtgcgtaagtatcatcgttatcattagaagtcagatagtagcgattgaccttaactaaggcttgatcaggcaggttggcgcgttgaattgctgaaagtgaattatatactcttgcgccactgcttaacgtagccatttcactaacagcatatgaattactaacctcccgcgtatgatgagaataaaaccaactcccaccgattattgccgcgacgattataataagtgatagatatattaaattttgttttttctttctctttgccatactagttattgtaacgaataaatttgaattttgtaggaaaaaactaattatttataagtaaagttaaaaatcccttgccttcataaatactgaaagcaagggatcatttttatttactaattattaatcagcctcacagcaaacatgatatttacgtgattaacacctatgcaagtggtattgttaaataaaaatatttatgatattatacacttacaaaaaataagtatgaggaaggagcaactaattatgaatgtcgaattaggaatctcaacatttggtgaaacgaccccactcgaaaaaactggtaaggccattagccatgatgaacggattagaaatcttattgaagaagtagaattagccgaccaagtaggaatcgatgcatatgctatcggtgagcaccaccgcaaagactttgcagtttcggcacctgaaatcattatagcgatggcggccgcaaaaacaaaacaaattcatctttcaagcgccactactaatttaccaacgattgatccaattcgggtttttgagcaatatgccacaattgatgcaatggctcctggaagaattgaaattatggctggtcgcggatcatttactgaagcttttgacttatttggttacgatcttgataattatgatgaactatttaaagaaaaattggatatgctagttgaaattaaccggaacgaaattcttgattggccaaaaggaaagttcacgccaaaagttgaccacattggaatctatcctcggccaaagaagcccttgaaaatatcactagctactggcggcaatcctaactcgaccattagagcggccgaaatgggactaccaatcgtttatgcaattattggtggtcagatggatgcctttaagccattagtacagctctatcgtgttgtggctgaaaaaacaggtcacaaattaagtgaaatgccagtttcggctcactcgtggggatggctaagcgatgataaggaaaaggcaatcaaagaatatttctatccaactaaattacttgttgatacaattagtaaagagcggccacaatggactggcatgacatatgaacaataccttgaaagtattggcgaaaacggtgttatttttgttgggaatgccgatacggttgctgacaagattattaaaatgatggaagtgcttggcttgaagcgtttctacctccacttgccaattgcctcaatgccccataaagatgtattaaaagcaattgaaatttatgggaaagaggttgtaccaaaagttaaaaaatattttaaggataaaagtaaattgaatgacttttcaattaaatggaaagaataaaaagatagacgccgatgagaaaagatttttctcacctgcgtctttttattattagggcttaatattctcagttgaaagtctgtgccgttcaaatggaactagggatatgttgaaggaatatttcccaggaaataatcatttaacggcatctttaattggaagataattaggattaagattattctcttcagaccgatcaacaaattttgcttcagtgattccatattcatctgcttaaatttcaatctttcctaaaggcgacgagtaattaaaccttgcaatcattatgccgtttctatttagtcaaaatgcaaaatttcatttacaggacgacgctctgaatggtagctattaattgtcgtatcagccgaataaccaagcgagataccaacaataaaccgttcatcctctggcacatctaaagtttggtgaagaatcgctgggaaacgaacgctgttataggttggaatcgttcccaagccataagcagttgcagctaacataatattttcagcaaataagcccgcatcaaaaatcgaccaatctggtgaagctttaggaatagtaatataaagaattacaggcgaatcatataaagtattacaggcgaatcatataaagtattactagcatttgtcatcttttcatgagcttcatcaaaattagcaaaatgatgaacaattccatgccgccattgcttcatattatcttgggtttgcggtgcccaatcttcacggctcatcactgacaaatctgaatccccttggttacctgcaatatcttgatcacgataagcattcttaatttcttgtaatgtatcgcccatcgcacaatatacttgccaaggttgagagtttacccatgatggagcacgttgagctaattcaacaattttagtaatcattttcttttcaacgggtttgtccgtaaattgacgaattgaatggcgttgattaattgcatcttgtaattccattagatgactcctcctaaatcacatactcttactaaagtttagcatatttaggtttactttaataagatcttgtattggtcactttattttttcgccgcactgcttctctaatcttgggatagcgaaccattaagcaagcaccataagtaaaactagttgcgacatttaacacccagatgaaccaggcgttgtgactacggaaaaatgcgattgtggataagtctttaagaacctcttcaaacagttcatgtgatatttccgtagcattaatatgggccccataaaacacttcaacactgatgccaattgcaaatgaaacaagccagcccacaagatacggccaattccttttaatcttcagaatcggtcgttgatgggaatctagtttattagtgtctttaatctgcgttttacttgtctgtagaaagccaatcgtagctcctaagattagaagaataattgtaagtccagctgccgttaaagatcttacgttttctaagctcaagaccatcataattgcagaatacactgggataattattagctcaaatcgtgttaccttttcatattcaaatgttcctttaatgaatttatagattaatagaattacaaatatagtcattgataataccctaacttttaagtttgtatttgtattgtactatatgactaagatagtgaaacggccaatttcaggaataataatctgagatagctaatgttagcaccaacatgtcccgtaacaatagaccattttcgtgaataggttgtccgtaatttttaacaaaaaagttccttttaatctcagtaacgcgaaaacctattttctggtaaaggtataactgcttaaagctcgtactcccagtgccaatttgcaattgttgataatgatgtacctttgcaaagtgaacggcatcctgcaatagcctggttgctattccgtgattttcaagccgtggatcaacagcaatattctttatttctaatttatccgatgtaagttcttgcaaaaccattacagcaatgggatgaccatctttagactgtgcaaaaagtatccctgattgcagataattttgaactaatttcttacttggatcagcactgagaagcaaatcccaatgttcaggagttactgtcgttactaattctatccttgtatcgttattagtcatttgacaatccctcatccatactattgatagttagaaactgctgatgaagctgttttgaaaatttcattactcaaactcctttttctattaagactgtttgcacacactttcttattaaggagactaattcccacttacattacttaaggcaacaatccagcaaccttatcgcctaacgttggataaatcgccattactttttggcgatactcatccccattaatcttcaaaccaataattggcaagaagttattaatatcatcagccgcataatcgccaatttcacttgcccctaccaattgctgatccttaaagactaaagtaagggtactgatgtgatcgttttggcctgcgtaaaggctaccatattttagcgcaactgtcttaacctgatattgtgagtcaccagtgacatcatctggattaacaccggcacgggcaacctctgggaatgtaaaggctgcttgaccaattgtcgggtaaacaatatcttgatccgttttacctattaaataatcaaaaagatattgaccctcaaattcagcgaccggtgttaatttaggttgtttccgattaataacatccccaattgcatacacaccgtcaaccgttgtcatcaagtgaccgtcgacattaataccatgacgatcatattcaatatcagtattttcaagcgctaatttttcgatatttggatgacgaccggttgcatcaagcacatagtcagcctgtacttcaccatgattagttgtaacgagcaagccgtctttcccttgagttactttttgcgtatcagtattaaagctaaattttattccccgttgcttcatcgcattaactagcgcttcatcttccgccttggtaaattcacgaaggacgcggtcagaatgaacaacgattgttacttcagcgccagcagctgctacaagggttgctaactctaagcccacaaagccagcaccgattatcgtaatccgttgtggaagttcttttaacgagaggaggtcataactggtatgaagatactctttacccgaaatattcagaatatttggtgtttgccccgtcgcaatgataatacgatcggcctggtattgatgaccgtttacactaatagtatggttatctacaaaacttgcgtagccgtcttcaatatcatgacttttcttaataatatcgcgagtttcgcctggccatggatcaaaccgcttaagcttagtctgcattaatgcttcccaatctaattttgctggttgactaatgcctcgaccaagaagttgctgagattggagaacagtccgggcagctccttctagaaaaatttttggttcgcacccatagttagggcaagttcccccatattcgaaaccctcaactaccaatactttacggtcggttttagccaaaagattagccattttataggctgctggccctgatccgatcagaatatcatcatactttttcatgttcatccctccagattcttacattattgagtcaagtgtaacttaagtaatgaaaagagtacaaacgttttgtttcgtcgtataaaaatattaatcaaaagtcaattaatacttatcctctttcattatgaaagcgaattcaactaatgatttaacagtattttgtctaacctattgtatgatccattcaagaatgatagattagcctttaattattaggaggtggtctacatgttacaagttaatacattatttatcatgatcgccagtattctcgtgttattaatgacaccaggactggcttttttctatggtggtctagtcaatcggcgccatgctaataacatgttgctaactgtttttatgatgtgtggcttagccgtgattctttggattacagtaggctactctctttcattttccggcaaccattggggaatagtcggaaatttaaataatacattaatgattcatgtgccaatcgatgctatcactaaaactggcattccaattggcgattatgcaatgttcatgatgatgtttgcaattattaccccggcaatcttttgtggatcggtcgtcggccacggacgctttaattttttaataatgtttaccatttgctggtctatctttgtttactacccccttgtgcatatggtttgggcaccatatggactattggcaagattaggggcagttgactttgctggtggattagttgttcatgtaaatgcggggataacggccttaatcctttcagcctgggttggtcgacggaaagatgttcattctcaacgcaataatttatcgtgggtattaattggaacagcccttttatggattggttggtacggctttaatgctggttcggccctcgccgttaatgatacggccgtacaagccatgttaacaacgaccatctcatgttcaagtgcaatggtaacatggatgttattggatcgttatcagtttaatcatgttaccctagctggtgtctgtaatggtgcaattaccggtttagtagcaatcactcctggagcaggctacgttacactaggtggttcaatgattattggaatagtcggtgcaatcgttagccaatactttattactaagatcaaaccacaactgccaattgatgatgttgttgatgcattcggttgccatggggttagtggtatctggggaagtattgcaactggtatttttgctagccatcagatcagtcatctagtacctaatgggcttttatttggtggtggtttgcaccttttgcttgttcaaatcttcgttaccttattgacaattatatttattggtgtgatggatattatcttaataaaactgctctcaattgttttaccggtttcgattgataatgaaaaactggcggcgattcaaagtaagtgaacttaaatttttactgcaaaattagattatttacgtatatattccttttagaagcaaaaatacataaggagtaaatttatgaataatctatcacgagaagaacaaattgccttaatctatgacaaatggcaaaagatgacaattactagtgatccaatgtttggactagtaatgcaaaataaagaaatttgtttagagttaattaatagagccctgccaaacattaaagcaaaacagattatccagttagacacccaaaaagatattaatattgttagtgcccatcgtgttcgctttgacgtttatgttcgtgatgataaaaataatatcattgtcattgagatgcaagttaataatcaaaataacataccagcacgcttacgttattaccaagaacaggttaatcatgagctattaagacctgaaaataattactcagtactcaataattaccctacttatattattatgttttgtaattttgattattttaagcagggatgggcactatatgaatttaatcttacttgtactagagaccataacttgaaatttggtgataatcggacagtcgttatcttcaatgctcttgctaaaaaatttgataaaaatgatgaaccgattaagaacttccttgctttaatgtgcaatcaaggcgacaataagaatagatttattgcacagattcaagacgaaattgataaagtcaaacaagatccagaaaggagaaatggctttatgaagtacgaattaaacttgatggacgctaaaatggaagcacgagaagaaggaatggcaaaagcaaaaagggaagatattaaaaagttaattgactctctttatgaacttaatattaaaccagagatcattaaacaaaaagttatggaaaaatataatttaactgatgatgaatatgataagtttctcggttaataaagggagcgagacagaagtcactcgtgacttcgtttttcgacgcgaagctagcctctgggagcccccgcaagcaacaataggccttcagcgttcgactttgccggacgctgaaggccattgttgtactgcgctgttcgtattttatggaagtgacctaacttatgtcacagctcttttattgatgggtccgatatccagctgcctgagcatcagctaatgaatcaaaataaacgacattttcaggagcaatcccagaatatggatattgccccggtaagtagcaatacattgttgaacgatcaccaataattgaatttggttcatagttatccggatcaacccacggctctggttctttaccactcgcgggggctgtatttccatcattaggctgttgagttgttgaaggaatcgttggactactattatttgaatagctcttctcatcattcggttgctgagattgctggccgattatcgaagacccccgttgactttccttaccgctggaagatttgatgacagaactagttttttctttatttttagattcttttgtcgattttttcttcttatccgattctttagttgttttaactactgcatcctcttgagtctcctgtgcctgattacgactactaatgaaccatccgccaccaattaataataaaataactattatccataaccatggtcgacgataaaacggcttccgatgttgatttctgttcataactggcctcctttatctttgaactttcgatttttaacaaaaacgtttccaaattcattatataaaatcaccatagcgatagataggtaccttcaacgggattaattattttttagagaattggttataggatattcataaaagataaacattcttcttaaaattattaactataattaactaaatactgaccatcatcaagtaaaaattgcttaaataatggcagcgtaaattttagctttccatatcctgctggtgttatgagttgactatccattaaccgccgacgatacattccaatataaccaggctttttctttaattttgttcttaagcaactagttgaaacagggtactcagaagctttagccatagtaataacaaattgctgatccataatagataattcttcaagcatcttactataagcatttcgacttaattgggcttgatactctggctggatactatctatagttttcatcgtaatgtgtttatccggtgattcccataaaagataaccaagcaattgaaaggcatatgcatatccgtctgaaagaagagcggcgcgacgaaccacttctggcgaaatttccggatctcgtactttcaatgcttgttggtattgcgctctgatatcatagtaattcagtggagaaagacttattcttccactacgtaataagaaagttaatacatgattattttgcaattcttgaacatttttgggtaatccagtcatgattattgagattggtaacccctcactaatcatgacttgatatactgatgctaattcaaccattcccgttacctcttgagcttcatcaatcattaccaatactttctggttatttttgtctaatatttttaacattttttttaatacaagttgaaaatttgatgtttgtttatcattaagagtgaattttaagcctaatccgcctatttcaaaattaatatcggagagttggtcgaatacttttttgattttatttgttgattgttggtaaatcatttcagccaaacgtcccaccatattatctccaataattaagtgaatagttatccacgtcggatcttgatcaatctgctttccaacagaattcataaaaactgtttttccaactccacgatttccataaatcaaagtagttcgataaggagtatcaagcgctttaatgtctttaaccaattttgattgtacttcttcgcgatctaataacacagttggttgaataccaaaacttggattaaaaggatttttcatattcttttcctctattttatatttctaatttaattttatatctgtttatatctttgctcaagttttatatctgtttatatcttaaattttatatgtgtaaaaagccaggtaactcccttctctaaaaaagttagaaattacttggcttttttatcaatctaattttctactctaataaaagtgatacttatttcatcatatttgatatttagaactagtaatctttttagctaattcagtatttactaatcgaatagctgatgaattcttataagaatttcccccaaagtttaaatcaccataccaacaaattttttgatcaaaaacacaaatattattaccaatttgttcttttaacttaaaatcgactttatttgataaaagtttatagtcacaatttctctgctttttacccaaagtaagggaaatctgactaaattttaccatttcattcaacatttcaatttgtttttgattaatcctttttaaacaaataaaggctttcttagcattagctagatcttgtctccatacctgcaaatagtcatttttagtatagtaagcagttgaataactattccattgcttactatggacaaaactatatccttgttgcttatagactcttaccctcttccgatacatctttgcaaatgtctcatcagcaatatcaacataatcatatacacgtaattcgtcttttttatctaggcttcgttctaatcgaccaagatattgctttgtattacctttccaagaaaaggtaacgttaaaaataatgtatctaaacttggtaaatcaaatccttctcccacatatttgccagtcgacaaaagaatatatgggtctttaatttttgataacttaatggataatttttgtgttccagtagtcaaatatactttgctatttttctgctttagttttgcgtaaagttcattaagatgtttaattcgttcactcaacaataaaatatgtcttccttcagacaatgcttggagtgcgtcctttactatttgatcattacggtcattattttcagcaatcaaccttatcttttgcgcataagtatcacgttctaatttacttttagcttcaagaaaactattataacgcggatatatataacgagaaatcaaatattctttttcactatcttgagcttggtagataatatttccacaacgataatacataaaattttctaatccatcttttctttcgggcgttgctgttaaccccagaacatatcgtgtgtttgcttctactaaagttttttcaaaggttaccgcagaaatatgatggcattcatcaacaattatttgttcatagtcttgaaatagttttgtacgctcaatagctgataaatggattaatttacgaatattaatgatatcgactaattttgaaggatgattacgagttccagaaataatttcaatttgttttttcttaacgcatcgtccagtcttagttaattctttatatggcacatccttaattttcaaaaatcttaaagcagcatctcgccattgattagcgatgttaacggtagacacaataatcaatgttcttgctttacgccttgcaattagcgcacatccaacaactgtttttccaaatccagtatgagcacacagcatccccaatttatttttatcaattttatttactgcttcttcttgttgtggccgtagggtacctgtaaattcaacattcaacgctttggacagagtaaattgttcttttaaataactatgacaattatcttttaatgacgactctactcctcgtggcaatcgtaaatatttaccatcaatttttgctgctgttaaaattgatggaacatcccacacaggcatgcgcattctttgtctcttaatatattctggattactaaaagtagctaagtttaataatgataattgctcttgacgcgttaaattttgacgattaataaatatttccccagcaataaagccttcaacttttttaggaaaattttgcaaaaacgggataattaatctagagttttcgccctttagaattttcagatctttagtaatttgactaatgaaattttttacttcttcttcactatacttttttgtgttttctaattggtcaaataactgtgacagtgctaaaggctgaagattattatcagtaaaaatagactttttctcttttacatcactccattttaatggcaaagcaatcaaatttccaaatcctttttcaggtaatcgatcttgattaggaatcatacgatcaaatgatgacaaatcaagactttcactagtaatcatcgactctactaaaatcaatttaccaagaaacctagctgtacttgccgcaattggttgactaaaaaatatccacagatgataactattaccagatgatgatatttcaggaagacagttaagatcatatttttggcaagtcttaattactgccttagtcattttataaggttcagcggttgattgatgtttatcaaaatcaaaaactaataactttgttttatcatcttttaataaaggatagatcccgtaacgatgatatttatctgaagaagaaatctgctcataaattactttcctagaataaggaagatattgtttcttcaattttgacaatgcttctttattatttcgcaattgataaaagcttcgccaattttttaatgctggactatatcctttaccattactccacttttgagcaaatacatcaggacgacctgcaaaataatcagcatataatgctagtttttcaccagttgttcttttcttagctataagacttaataatttctgttcactaataatccaatccgtccctttatcagtggtaattgagtaaaatttttctttagtttcgtaatgccaatatgcttgagtaacggtaatgatatcaccgttatttaacgcgtattctttacctatttccatgtagtttaactccatttagctagctgctattattacccatcaagattctcgaaactttagattagccaaatcgtttaataacagtattaatatcatctcttaattctttactgaggccggttaaatcttcatctgtaattacattctctgataacagctgcaataaagtctgaaacatggatcttttcgatacttcaacaagcacctcgggcgattttcgatccgcctttatttgtttttccagcttccaaaatttattcgctgccgaaccatcaccatctaatattcttttgtattcctgattaaggcgattcatatatctttcttgccattttggaagcagcttgttgaataattgccaatcgcttttagagatatcattcatttcttcttacctcgtttttactttaattatacgataaatcgttttatgaaattcaacttcttttgcgccttataccaacaccaaagcctaatcctactctaacatgaatccacattcaaagatggtattaaagtttacatagcactcagctcttcgaatttgggtgttatttttagttaaccataattgcatttcatattcatatattaaccacttatctttctatcaatcacaaatattgtttttactgatatattcacactatcaaatatattaggaggcattttaatcatgttaattaaggcaaataatcttactaaaagatacggaacaaaattagctctagataacataaatttacagatcgatcgtggtcaattaattgcttatctaggtactaatggtgcagggaaatcaactactatcaatcttcttactggtttaatgacgccaacctccgggatgatcgcacgccgtcaaggaataaaaattggcgttgtcttccaagatagcattctcgataaagagctttcagttaaagataatcttaactttagatcaaacttatatcatgaagatcatactgaatgggttcaccagttaattagcctaatgggcctcacccattttctaaatcagcgctatggaacattatctggtggacagcgacgcagggttgatatcaatcgtgccttgattaccgacccagatattcttttccttgacgaaccgacaactggattggatttacaaacgcgacttgttatttggaacctccttcaaaagctacaaaaggaacatggtctaactatttttctaacaactcattacttagaagaagccgaaaatgccgatcaaatgtatatcttagaaaacggcaaaattttagtttctggctcagcaaccgatattaaacaacattatgcaccaactaaattagtggttacaacaaatggacataagctacaaactaactactctgagaaacaattaacacctcaaaaattttcttttgatggccttaattgttcagaagttattacattactacatagcaatcaagagtatatcattaacttctcatatacccccggttcaattaacgatgcttttgtcaaaattaccggaaaggagcttcaataatatgattgcgttaattaaaaaaaacttaaagatttactttgctaataagattggtgtcttgatgtcttgccttggtgctttaatttcattctttatttatattggttttttgcagcaaaacctgatatcttcatggcaatcattgcctcatacaaaggaaatgttaggtttatggatgattagtggaattgtcgccatcgccggcattaccacttcatttcaagctcttggacaattagtcaaagatcgagaaagccgaacatgggatgatttaagtctaactgatttgacaccgttccaaattaattgtagctatttaactgcaacaatatttattagcacattaatgcagattattacattcttcatcatggcagtttactttattttagtagatagtattactattccaactactgcattgcttctcggattattttttattgttttaggtgcaattggcgcaagtgctgttaatttaattattgttgacctaatccattcttctacgacttttagccgcctttctgccataattggcgcagcttccggatttatgatcgctacttatatgccctatggaacattatccaaatcagcacaatttgtagtaaaattatttccaagtagttatgaggctgctagcttgcgaagccttctgctaaataaactaagcaaaaaatttttaccgccatccagtcggtaccaaatgattgaatatctgggtatccacttcaagattcatggttatcagttaaataattatagtaatgcattaatgattgtgggaatgtctatagttttaatagatcttggagctgtttgggcaaatcgatatcagaggaagagttaattgtgcaaattcattttcagtcagatccattactaggtcctgacgatcttaatattactgtgaacgctgttactaaaaacgacaaagttattaacctgcttaattatttagataagtatgatcaaaaaagtagctctttaatcccaataaaaacagaagataggattttaactataaagcaaatagagcttatcaaggtagaggtaaccaaaaacatcctctctttttatacaaaaagcgatgtaattcaagcaaacggacgactatatcaagtattaacaaggcttaacgaaaattttgttcaagtatcaaaacacggcattattaatttaaatcatttactttccctagaagctggatttactggcaatatgattgctaaattaaattttgatcaacgtgccgatgtttcacggaaatatctaccagagttagaaagaagattgggactataaaatgataaatttaaaaaggggtatccgttactttattcgcgggatgggttatggatctattacttatctcgcaattattgcatttctcacacataatatgactgtttctactactagtgtcattacagtgttcattattagtggattgatcggggaattaagttttgtctttcaaacagaactaccgtattcgatcgctctcgttattcacctaatcgggacctttattctatattctgtaatgatgctaatcaatcactggcctcttaattggcaaaccattgtaattttcattatcgtctatatcgctatttggctttttattcgtttgttagaagagcaacatattaatcgaattaataagcaaattagaaacaggcaaaaataaattttgtatcgcaatcatcgcttcgttactaaaatgaggtgatgatttttgtataggttaatgtccatacaatcagatgtttgataacttcttagtttcacatttgcttgtcgatctgtcattttgctgcctcccttaacacttttcttttatataaaacgttaagtacacgattaccctacaaacgcctacttgactatcgaaatagaacatagaatactcgactagttagttcaaaatagaaagaatcaccatctttcaacgttacataaagttcacgttcaaagatggtgaagtggttaatttaactatttaaggttaagttttcaatgcaatgatcgccattattatctcattgaaggctgacaaagatttccgtatatctgttaccttacacctcttacaaaaatagtgaggcgaatcatttaattaactggtttaattcgttgatgtccacagtatcaaggtcaattggttctccacctaaccagtctaaaaagtcaggatcaacttgccctttttggtaatcatcataatactgctctaaagcaccgacaccaccaacatattcaataataccgtaaccacgggctttttgaacatgtggtagctcctcattagtaactggttgaattttttggacatgaagtttaaactcccagccgtccccatagtcataatgaatagttaatttatctttttcatttaataatgagaccgttgctagatcaagcttaacttttgtcatcccgcctggcacaaaatcttctgactgagtataaaattcctgagtctgttcattaattgcatcatacaagtgtcccaagttaccatgaaacatcaaaatcactgtttcagcgagttcctcaattgtactactacccttaatcacgaacgtacggcttgctagcggtttaaaatcagctaatttagcagtaattacatacgcttgaccatagttttgcgggttaatcaactgacggttgccaacattcgttggtatatctgcttgtgctggagctagttcgtcaagcaactgctgaataaatttatcttgatagtcatcttctggcgcagctaattccggttctccatagataatatcgtagcttgtatctagatagtctgcaacatccctagcagctgattgactcacgatccctgtgtgacttagacaaacataaaaattggataacgtaacagaaagaagatcctcatcaatttgatctaacgttccagcgaaaaagatgtttggcgcagctaggttagtagtgaccgtgcaaattttatttttaacatgaagtggttcaaaaattggtccaagatacgacgagcagtcttatcatctcccattaactgaccatcagcactggcgataaactggtcaatcatttgctggttgttttggctaatcgcttgaactgttgctggattatctgctgaggcttttccttcgtcatccgcccaaatacggggatctttaaattgtggcttgatcgtacaatattttgcccccggtcgtggagctttcacctttaccggatattcttcattaaccaattggcaaaatttcattaatacttcctgatcatttccagatagagctaacaataagtagacaagatcattgaaatcctcagttgatgaaaaatcatcattatcgttaagggtttccttaaattctgcttggtggctagcaattatctgcaaataatttttaagtttttcgttttcagcagatgagattggccggtataaattaaatgaaaaaacattctgcattaaccaagtacgttgtggatcaaccaaaaaaggcatttcatttagaaagttaatggcaacttgactaaacttaccctcgcctaatttgtcagtaaagactggcaaaccagtttcctcttctacataataggtagtatgttttattatcaatctttaccagactaagccgccaccgtcgtaaaggtttttggctaatcttaccagtattattataaggtagtcgatcagccaggtcaggactataaaataactgtgccatgatgattgctcctttatttttgaatgtgtgagaaatgaattttattcgcgctctataaaagaaagcgaagggaatatcatctatagtttacagttgtaagaatgtccaagcaagttatgatccctgaacattaatccacagttttagcaattttttgatagtattaaccattttacttaaatcgatattgggcaattttttgcaaataactttggcggcgttgcggggatgaccaggaaatcccgccaaagttaagccacttccgatgctcaaagccaagttgtttcaaggttgtattaacaaatactcgctgaatatcatccccacagaaaaaccgcaagtaccaagttggcgaagttgaagtagttaatacatagcaatgctggacattcgtcaatagccctttaattccggtcctggttaccgtatgggagagatcggggccctctttcatcaccttatcaataaccccttttaacattccgggaatactattccaccagcaaggagttataaaaatcactgtccgacatgattttaagagttctaaatatttgcgcaccaagggatcaactgtccctccttgatgatacaatgaaagttcttccgcagaataagtaggatcaaaatgttccgcataaaggtcaattaattgaaccaattagtcgaaaaaagttagaaattaacgtttgaccatcgagttcatgttggatttgagttatactttttattgtgcaagacccctttatactttgtttttggttatttaaagtatagtccaaaggggcttgcttttttaatttttcgtagaaaaaactgatagcctcgcctgtttgacatggttatcagctttcaagtttcagttataaatgaataatttggatcgttcgcaaatgacgcgtgagtttactatccgcttccaattgagcaagcgtccgcgataatgtttcgggggttgtcccaaggtatgaagaaaggtccttgagtttcaagggtagcttaactttcgaactctgttgatcaaccatcaattgtttcagataagtcactacccgttcttcaatgtttggcagtcccatcagccgtgtttgctgacgaagactttcaatcattgctgcctgtcctgccattagttttaaggtaatttcgctttggtggtgaatcaactggataaagtcttgccgattaagactacagatatcactgtctgtagtcatttctacataactactatggttggcaacccccaggagccaggtttcaccaacataatcacctgtcttcagcattcgttgcacccgttcttcaccatcttcacttagttggtacattcgaccatggccactttttacaatcactaaccggtcatccatgtctggactcacaacaattgttccgcgcttaatacgctggtgatgaaccagctgttccacttggcgctggcgttctaaactcaactgattaaagagcggaaccaggtgaacacaaagttcttctttcattagagtatcctccatcattcgggtgttagaagtcatcatcatcttcttcagtatacaaccccgtccgtaaatcatgccccaagaagcgctgggttaaagcaatttgctttttgatccatgacaataattccgttaaatctactgctaattcgggccactcttctttattgccaagagcaatggccttcgtgataaagagaatctgcgtgtcaaaatcctttaccaaggcaaataattggtcatcccctggcaaatacttatcagcacccctttcttctagcatggtaaattcacgaaactgatccgtcgtcgttggaatactctcaccattctgaactagcagctgattcaggtgattaaatgcttcctgttcatgcgcaatccaatcatcgccatattgggataaaaacaatgccgcattccctttcgtaaacagctttgcctgactaatctttagtgaatgaattaataagttggcaatgatatgacccgtcatcgcccctgccgttggtgtatggtgatcaatatcgctctgttttagttcctgttgatactgttcttcactagtcatctgatagctcctttaccttaattccctgaaccgtgtatcccattttttcaatatttgcttgaacatcatcgggtgaagctttggccaaatctagtgtaaatttaacctttcccgcattgaacagtaccttcacgtcatcggtcccgtcaatggtttcaacacttttttgaatcttagttaggcatgatggacaagttaaaccatcaagtttcatcattactttttccatggttatcactcctttgttattttcattgtaatttagccaccgtaaataaaaattgattatcatcaattttgagaaattcgtttcatcaaccgcatactgttcaaaataacaatcagaatactaagctcatgaatcagcattcctgatgccatttcgatataaccaacaaaaagtccaataaacaatagcactaccgtcagtaaggcaatcaagatgttttcattcatattggcgatggttcgccgtgccaagcgaaaactggtgactagactattcagatctgatttcacaagtactaggtcggctacatccattgcaacatcagtaccggaacccattgccactgcaacatcagctgcggagagtgccggactatcattaatcccgtcaccaataaatgcgatccgatgaccgtcagcctgttgttgtttgagatagtcagctttcccttgaggaagcatcgctgcgtgaacttcatcgattggcagtttagctgcgatctgatgagcggttccttcattatcgccagtcaacattatgagtcgtttgacccctaacgcttttaattgtcgtaacgccgattgtgcctgtgatcgtaactgatctttgataccaaagattgccaattcatggtgatccatgctggcaaaaataacaatcgaatttccatcactcgtcagttgatcaatgagttggtcgagagttgaactggtacctaataagtctttaatcagggttggattacctaataagtactcaccttcaccaatttgcgctcggattccctgtcccttaatcgtttgaatatcggttggctgataatcgtgcttcctatctagcttgccaattgcttgtgccaacgggtggtccgatcgttgttcaactgctaccgcttgatcaataatcgtctgtcggtctccgttcagaacattgacactagtaacaaccggcttcccgacggttaaggtacccgtcttatcaaaggcaatcgtgtcaatatgcttcatccggtccatgacatcggaacccttaaagagaatcccctgacgagcaccattaccgattccagcaacagtagatgcagggacaccaatcacaagcgcacctggacagccaagaaccattacggtaattgctaaccgcacgtctcgtgtaatcaagccaaccataattgctaccaatagcacaactggcgtgtaataacgggcgaagcgatcaataaagcgttgcgtcttcgtttgcgaatcctgagcttcttccactagttcaataattttaccgaacgtagtatcttcgcctgccgcggtagtattcaccgtcaccgtcccattctccaaaatggttcccgcaaaaactgcatctccaggatgtttcttaactaaccgagactccccagtaatactggcttcatttagaacggcagtcccagtcttgatcgtgccatcgactggaacctgatttccagtcttaattaagaccatgtccccggatcaatgaagtccacatcctcatcactggtattgccatcttcatcaatcaccaccgcggtttgaggagcaagttcggttagctgcttaattgccgaccgtgtcttccttaaagtagcgttttctaatacctcaccaaccataaaaagccaggtaacaatcgccgcttcgttatattcgccaatgataaaagcaccgatcaccgcaatactgacgagaacatcaatcgatatcagccgtacctctaatgatgaaatggctgtgaacaaaatcggcaatagaccgatgacccctgcaatggccattaggatctgatacattaagttatttgagctgataaagcgaaaagcttctgccagaattaataaaacggtcaagccgatcaccaatgcttgccgttgctcagtcaggaatcgttgtactttgaccatatcggcacctccttttactgtccttagtataagaaaagaagccagtaagttacttgaccgccatcaagtttggtaatttaaaaagcctcataattggattaaccaaatataaggcttgatacgtgtttctacttatttaatttgctaatgatttcattaattaaatatttgatttagtttgaatcagtccagcaagatatttaccatcatcaatactcattgtggatcgatgattcagccaaaagagaagtaacttgataatactgtccacatacagtgtttgaaaaaacttatagagagggaccttttgaatttctgctctagtcgtgttgaataagtacggagctcgttcaagaaattcatcgtttgccaagttaataatcgcatggtatagattaatatcgccattgtccgataataagacagccaatatatctttacgatcatcacaatatttaagggtcacattaaaagcagagttagctaattccataattttttgttctgatgcattatgagtatcttctagtgatgtccggtctttttgcagcgcatttttcaagctaatgaggatattcgtctctacccagtggataaaatccttcttatttttaaaataattataaaaggtcttcttactaacttcgacttgattaataatatcgatagttcgacattcacttaacttttgtgttgataaaaccttaattaatccattgaggattcggtttttagtattgattgtccgaacgtccatttatccttgccactcctattccatatgactaagcgttttcattatagacggtcggcaatattattacattaaatctcggttttcttacacgctcagtttacatttttactcatttattctgtaatagcgtccctaactttattaaacataagccaataacagccccgatgaaaagaactaattttaatattcaagtactggggttcttacttcatagcaggcagtcaaaattcattaaaccagcgtcgcacccagtgaattcttaaaatggtcaagcgcccactcctgaccatgcttggtaaaggtggcgacccccttaaccggaatcgtaatctggtagttcaaattataggcggcaattgcggtgtgcaggacacagatatcggtgcaaacacctgtaatccacaagttatcaatttttcgttctcgcaggtagttatcaagattagtattttgaaatgatgaatagcggttcttattaaactggtaaacccggtcactggcctgatgttgttcaaaccagtcattaaccttgccgtatagctgttgaccaggcgtaccgaccacgttatgtggcgggaagagtttagcttctggactaaaccggtccctacaatgggcatcagtcgggaaaattacgtagtcgccattttggtaaaaacggttggccagctgaaccaaataatcttctaattcctgcgctggcttgccacaagtaagcgcaccattgtcagcgacaaaatcgtttgtataatcaataattaataatgctttagtcattgctaactccttatttttgtgcctcatcaaccagcttttgttgcatgtcagctaaccgcttggttaaataaactgggaagcggtccggattaagcaaccgcttagtagccgccggcagctgtgctaattcggtctgcgcaaaatgctggatggcaaaagtgtcggtttcaattggcgccgcttttttcagtgtcaaaacttgcttaagcagtggcttagcaatgaagtcagttagaatcactttattccgggtgacgtgaatgtcagcattgattgccgcaatttcggttccaatctgctcgtcagccagggcaattacatcggcaatagcgtgttggggattatgcttatcgtagagccggtaaatctgcttattcccagggagcgtaatcttttcgcgactattactaatcttgatctttggcacccatttgccatcattttctagtgccgacattttataaacaacgcttaatactggactggatgaactggtaattagtcgctcaccgatcccaaagttatccagtggtgccccttcatcaagcaatgacttaacaatgtgggcatcaagggcgtttgaagcagtaatcttagcgttggtaaaaccagcctcgtccatcatcttccgagccttggctgccaactgggcaatatcaccagaatcgatgcggataccaaccggttcgtggccagctgcccgcaattccttaaagactttaattgcgttcggtactccagagttaaccacatcgtaagtatcaactaacagggcagcattgtcagggtaaattttggcccaggcacgaaaggccgttaattcatcaggaaagctttcaatccaggcgtgggccatcgtccccgccgccggaaggttaaacagcttggcagctagcacattggaggtactactgcacccaccaataatggcagcccgcgcaccatatattgcggcatcaggcccctgcgcccgtcgtgcaccaaattccattactgggcgtccgccagtaacgctggtaatctgccatgccttcgttgcaatcaatgattggtggttaatgatgtttaagatcagggtttcgagaagttggacatcaattagtgggccactaatactaaggattggttcctgtgggaagactggcgtgccttctgggattgccttaattgagcagcggttgtgagctgctgtcaggtaaaagagaaagtcgtcactaaagtggttaagggaccgcagataagcaatgtcaccagttgaaaagtgccagttcttaacttcatcaattacttgcatcaatccagcactaatcacaaaactgccatcatcgggcgccttacggtaaaagacatcgaagcgcgcctgcttatcgtggggaagcgtttgataataaccgttggccattgaaaactcatacatgtcggttaataattcatgtttcattattaaataactcctaacaagtttaggtaaaaaatactttaactactgcaaaaaataaaagtatattgaacttttattatcactaattgtagcacttttatttttagacgcaaggtagtaccagtttaaataactttggtggccggcctgaccgctttgttgcggcggtaccaacttccttaaacagcttttggtgggtctttttaaaattagaattatcaatttgatcgaccgttgtttggcggaaagtagcataaacttcgcgggcttgccgaagggtaaaagtcggtcctaagatctgtaaaatggttggctggtagtccagtttatttttaattcgtacaatggccgtattaataatttggtggtggtcaaatgcaagcgccggtcctgcagccaaactcaaaactaagtcaccattttgcaagataaacttcccgtggtcaaagttaagactaaaccacccgacttcggttgctccgtacccggccctcagttgcggcattgtcggtaagaaagtcatgtaggcaatcgccaaggcccgcccacggcttacccggtcgggatcggtgaaggttgccaactgttcggtagcactgtttgatagacgaacaccaattttatccttaatcaggcggatacaggcagcgtcagcactttcatcccgccacaatagggtttctggtaaagcccagtggccctcaaatggcggataagcccgtttgaccagcaggacttgtggtaaatgggtcaagggattaaaactccaaataatatttgcaatcgtaattagcggatgcgcaacaactttgtcagccatctctttcacctcacaaaatattatagcgcaatcaagaatcacaataataaaaaatcgacaactaaggacggccttagttattgatttaacctaaattaacttctttaattcagcaattgctttttcgtagtctggttcatcagttaattcagttacaatttgccggtaaacaaccttcccatccggatcaagaatccagactgaccgcgcaaggattccttcatctggtattaacagctttgattcgtaaccaaaggattcttccttgtcagaaaccaattccatgtttttgacaccttcagcagcacaccacttctgttgatcttcagtcgtgttagttgaaatggtcaggaaattaacctctgggaattggtccattgttgagttaaaccgctgtgtttgaatgctacaaaccggggtgttaatatctggaacaacgcttaagagagttattttgccaagcaattgccgggtcttaaccttgtcaccattcttatcaaaaaccttgaagtgtgggaattcgtcaccaacagctggtggattgcctactaattgccgcttttcaccattaattgtgatttccattcttagcaactccttttctaattttggttaggtacagtatatcaaaaacgcaattaaaaagcattgattatactcattgttttagaaaatttatgagctgtgtagctaggcaaggtatcttttaacctcgcggtttgtaaaattaagttagaaaaataaaaagccatttgtggtagacttttgaatacccatacatcaaaagaaaggacaccacaaatgacctaccatcatcttaccatagacgaactaacgatgatcgctaattttcgtgaccaaggagtaaaagcctaccgggccgccaaacttttgcaccggagcttagaaaccgtctaccgagtttatcgctttctggccgccggccacacgctccaagaatattaccaacactatcgtgaaaacaaggctcattgcggtcggaaggctattcaattgcccactgatgaggtaacttatatcaaagccaaagtggctcaaggctggacgccagacacaattatgggacgcgctgaacggccactcagctgtagtatgcggacactttaccgccttttcgaacggggcaattttgatgtgcggaccttgccgatgaaaggcaagcgtcgccccaatggttacgtagaacggcgggggaaggccggtcaacttggccaaagcattcaccaacgggctatcgactttcccaactttaaccgtgaattcggccaccttgaagccgacaccgtccagggcaaaggacatcagggcgccgttatgactttggtagaacggacttccaaagtcgaagtgattcttaacgtccatagtaagacggccaccagtgtgatccagcacttacaggaatggttggcaaagtttccaccccacttcttcaagtcgattaccttcgacaatgggaaggagttcgctgactggcgagcaattgccaaccaatttgacctccagacctactttgccgaggtgggggcacctaaccaacgggggttaaacgagaacaacaacggccttctgcggcgcgatgggctccacaaaggccgcgatctccgccacctagctgatgaagaggttgctcaaataatgagttaccggaacaacattcctcgcaagtcattgggctatcaaacaccttacgaggtattcatgaagtatgtcactgatgagcaactactttttttctaacttaaattgacatttcgggcctaaaataggcagcgttaccttctaaaaggacttaatgtgttaactaactgcctttatatttcaatacatcatactaaggtaaattctcctaaattttataaattatgcaactgcaaacacatagaaacaatgcctataaatattgatataccagtcatttgaagtataacagaaaaattagacaaagttaaatagttaaactcgtaaggcatggttccggtattcaaccggtgtcatgccttttgtttttaaagagattcgttggttgttgaaacgatatacatagtttaaggaaagctttttgaactctccaaaatctttacatggcgtaaatccattaaacagttccgttttgtataggtgaaagaaactctcaatgggcgcattgtcatggcaattgcccttacgggacatgctttgaacaaaatgaagattagctagtgttttggcatagtaaacctgctgatattgccatccttgatctgaatgaataataggatgggcattatcaggtaatttttgcagtaattcatcaatagtacttttgaccagttgtagattgggatgataacttacttgaaaagccagtacttccttactagcttcatcaaccatagctgaaacataagcccactgttgattagctagtcatatctgagtgatatcgatgtggatgacttggtatggtttcgttgctgtaaaggattgttggagaacattctgtgcaatttttctaacagtaccgcgatatgatgaatatttaccattacggtgttggttatacatacttacttggacgcctagctgacgcatgatgcgggtagctgtggcgtcggctaagtgaatcccgtcttgatcaagtaaagctttcacgcgacgataaccgtaggttcgtcgtccgcgataaagcccctgcttgctaatcgccaacactcgttgtttaacttgagcgtatttatcgtaagggttagcgatgcgcttccgctcatcgtaataagttactctcgataatgagattctttggaggagcttaccaaccgagtgacgctgtttcttaggaagcttagcttgatgagccctgatctgatccactatttgtgttttttgtcgagctttgagggtccgaacagggccaacgatttttttagaatatcccgatccattttgacgtcatacaattcttgtttggtttgcgccaattcttccttaagtcgttcaatctcatttttattgacttgtttctttagcgctttccggtttttctttttcactttaggtggcctacctttaggatgaggctttaatgcctggtaaccgccttgatgaaaatctcgtttccaatgactaatttgattaggcaagagatcatatttggctgctaccatcgccattgattcctcatgagtttgatagtagtttatcacgctcaatttgaaatcagcactaaaggttcgcttcacgcgacgatgttgaaggctggtgattccttgaagtctggcttgttcaatccaatactgaatataatggtgactaagatgatattttttagctaactggtatgaaattaagccatctgttgcccattcacgaacaagctttaccttgaattcagaactatatttagtcacgcggtttttcaagttccataatttttcctcaaaatcatcataaattctatttcgagtatactactgtccagataatttataatttttgaatctaatatttaatatttaatgagtagtattatactaatcaactcaatcgtttcacctaaaatccaccatttcttcatctgtcataattccgctcatatcaactgttccaactcttttcactaccctaatcaacacgacctgccaaaatggacattcgtacacaccactatcgaaataggacattgaacactcgacctgccagctccaaatagaaaagtgtactaatcccaatcttcaaaatcagaatttgtacactttcaatcagctatagatgccgtcatgccggcgtttatcggctatttttctgtacgttccaggacagtaacagattcaacatgcgtcgtctgtgggaactggtctactggctggattggctttgttacatggtagccttggtcagcaaaacgcttgatatcgcgaactaaggtagcaggattacaggaaacataaatcactttctttggtgccatcttaccagtagcttcgatcagactttcagcaagccccttccgtggtggatcaacgataataacatctggtttgagcccttctgcttgccacttagcaaattgatcttccgccttaccaacaacaaatttggcattcttaataccattccgtttagcattatgtttggcgtcttcaatggcggcgggaacaatttctactccataaacttgcttagcgtgcttagctactgccagggagatcgtgccaattccacaataggcatcgatgaccgtttgattgccgtccaagccagcattatcaatggccgtttggtaaaggcgttcagtctgttgcggattaacctggtagaaggacagtggtgagattgcaaaatcaatcccaaggagctgatcatgaatttcatcagcaccccataacgttttattcttatcaccaagcaagcggttcgttcgcttatcattgatgttttgcacaatactttttacttctggcactctggcaacgatcccgtcgacgatttgcttttccattggtaaccgcttcgtattcgtgactaagactaccatcatttcatggctgtaatatcctcgccgaaccattactgtgcgaatcacgcccttaccagtttgttcatcatatggcgtaatgtggtattgccgtaataagtcacgaacaaccgcaatggctttatcaatttctggatcctggatatagaaatcttcaattgatactaaattgtggctcccccgcttataaaaaccggtttctaattgaccgtggaccattttgactggtacttgggccttgttgcggtaatgataaggcttttccatccccatcgttggcaaaacttcaatctcatctaagtgtgctttggccaataattcttgaatttggtgttgcttgaatttcaactgggcatcatatttcaaatgaccaagcggcgcgattcccgtttgaatgtattttttatccttaacatcaacgcggtctggactcttcgtctgccagtccattacccgtccccaagcaaagtggctggttaccttggtgatctttaccgtaatctcttcaccaggaagggcattaggaacaaagacgggaaaatcatcaatcttaacgaccccattgccctcgtaagataaatccactaccttcgctggatattcttcatttttatgtactggaatgtttaatttcaaagttattcctccattaatttcaacgttacaaacttctcctattataacaaaacaaacggccaacttcctctttgcgaagctgaccgtttatttattctatttctttttgcgatctttataatcgtcaatgccattcataaagtcttcttcgacccgcttaaaatcagctgaggttgtaatcgcatcttctggaatctcatccaagttagcaattacttctaggtgctgcttaaggttatgaaatttcattggcgcgtcgccaccatattccccgtccaggttaaccatcaagcggtcatccttgtttagcggaataacttcaatatcggttgctttagcataaataatacgcggatcatcaaggtgctttccttgaagcgccttcgccattaagctgagcatatcgatcacactgctcttcttaacgataatcatcgtaaactttccatcatcaagtgatgcatccggcacaatctgttcaaaaccgccgaccgaattagtcaaggcaatcataaacatggaagcaccgccccggtattcctgattatcatacttgattagcatgtcgactggcttaatccgcggcattaactctgctcccttggcgaagtatgctgcgtaaccaaagagggacttcatttgcgaagggacctcataggttaattcagtcatcgttccaccagcagcaatattcatgaagtagttttcaccagcccgaccaatatcaatcttaaatttcttattcttctttaagattaacttagccgcggcgatcggatcatcacgaggaatccgtaatgcccgtgcatagtcattagtcgtccctgctggaataatcgctaatgttggccgatgttctaacccagcaattccattaaccacttcattcagagtaccatctccaccagcagctacaatcaaatcaaaaccgtcttcagcagcacgagtggcttcgttcttagccgagttaggcgcaggagtagtcgcaaaagcactagtttcatatccagctttctcataaattgcgagaatatcaactaaatcacttcgcaatgtttcacggcctgaggtaggattataaattatccgagcacgttttcgcacggtcatccctccctactctatttagccttcaaagacttcatcaataattgagtaacaacttgtgggttagccttaccacgcgtttgcttcatgatttgacccattaagtagccgacagcccggtctttaccattcttaaagtcttcaattgattgttcgttgttatcaagaacttcatcaacgattggctgtagttgcgcaggatcagataactgaacaagaccgtgttcctttgcgtaagcatttggttcttcaccatctaagattcccttgaagaccttcttagccatcttagaagaaattgttccgtcttcaatcaacttcaccataccggcaaggttagctggagtaagcttggtatcttgtaagtcaacttgcttatcgttcaagtatgagtttacatcgttcattaagtagttggctacccgcttaggatcgccaccgttcttaacagcttcttcaaagaaatcagacatttccttagtctgggtaagaaccatcgcatcgtaatcagttaagccaagatccttaacatagtgctcacgacgctcaccaggcatttctggcatttcgctttcaatttcgctaatccattcatcgctaacgtttactggtggcaagtctggttctgggaagtaacggtaatcatcagaaccttcctttgtccgcatcagaatagtctcaccagtcgcttcatcataacgacgtgtttcctgaccaatgtgtccaccagccatcaatactttttgatgccgtttttcttcaaatgcgagggccttccgaacatagttaaaggagttgatgttcttcatctctgtcttggtcccaaacttatcagaaccgattggccgaattgagatgttggtatcaacccgcatggacccttcttccatcttcacgtcagagatccccgtaaattgaatccgttgacgcaatgcttccaagtaagccactgcttcttcaggcgaggcaatatctggcttagaaacaatttcaattagcggtgttccttgccggttcaagtcaacgtatgaatacttgctggtgtgagtgttcttaccagcatcttcttcaatgtgcatttctttgataccgatctttttctttttaccatttatttcaatttcaatccaaccgtcatgagcaattggagtatctgattgagtaatctggtaggctttcgggttatcaggatagaagtagttcttccgatcaaagtgcatgtgatgggcaatttgagcatgaagagcaagtccagccatgattccgtcacgaacgacacccttgtttaagcttggcaatacaccagggtacccccagtcaatgacattggtgtttgcgttaggctggtcaccgtattcaacgggggatggactgtaaatctttgaattagtctttaattcaacgtggacttctagaccgattgttgtttgaaagttcatcttagttttgacctcctaactttggtgtcttcttgtggaaatcagttgtctgttcaaagacatatccagtgttataaactgtttgttcgtcaaatgcttttccgatgatttgcagaccaactggcatgccatttttagcagagaaaccagcaggaatagacattgcaggaaggccggccatattaacgggaacagttaatacatcgttcatgtacatggtttgtggatcatcaatttctgcaccaatcttaaatgccgttgaagcaccagtagcaccaacgattacatcatgatccttaaatacgtcttcaaaatcttgggcgataagacggcgaactttagcggccttattaaagtaagcatcatagaaaccagcagagagagagaaggtccctaacataatccgtcgcttaacttcttcaccaaaaccttccgaacgagaacgaacataaacgtcttccaggttcttaacatcagcagctcggaagccataacgaataccatcgtaacgttggaggttagaagatgcttcagatgaggctaaaatgtagtaagcaggaaccccatacttggtatgtggcaaacttacttcatcaacaattgcgccgagggattctaagtggtccaaagcagccttaattacttcttgaacatcttcgtctaagccatcaaagtattcctttggcacagcaatccgtaagcctttaacattcgtattttcgtttaattgggctgcccagtctggaacttctttaagtgaggatgtcatatcccgttcatcatttccactgatgagggcggtcaacaaggcattatccttaacattttgagtcaaccagccgacttggtcaaaacttgaaccaaaagcaatgatcccccaccgtgatacacgaccgtatgtaggcttcatcccaacgacaccgttaaaggaagcaggcatccgaatagaaccaccagtatcagtaccaagtgcacctaaaacatccccggccgcaacagcagcagcagaaccaccggaagaaccaccaggaacccgggtaagatcccatgggttatgagtcgtaaagaatgctgaattttcagtagatgaccccatagcaaattcatcaaggttagtcttaccaacgttgatgtaatcagcggcatttaacttttcaaccactgtcgcgtcatatacagggttaaagttttcaagcatcttagaagcagccgtcgttgtgaggcctttagttaagatattatccttaactgcaagcggaacccctgcagttaattgatcagcactaatgccctttgcatcaatctcagctgcccgcttcagtgcttgatcttcatttaagctgatgaaagctttaacttgatcttcattacccttaatgtggtcaaaagtttcctttgttaattcagttgcactgattttcttatttaccaagtcatcgtgcaattgactcaagcttgtttggtaaaaatccattattcgccgtcctcactttcgtcaagaattgctggaaccttgatgtagccaccatcagtttcaggagcattgttaagcaaggcttcttgttcgtctttagaactcttaattgccttatcttcacgcattacatttacccgatcggttgctgatgtcattggttcaacgccatcggtatcaaccgcttcgaggtcttcaaacatatcaataatgtttcctagttgagtggtaaacttaccaagttcatccttagggaactcaagcttagcaagttcagcaacgtgttctacttgttgctcagtgattttactggccattctctctacctcttttccagtaatttaaaatctacatatacatttaacaattttagcacagaataggttcctatttcatccatgtagaaataaaaaaaggagttatcggttcgcattttctagtaacgaatcgatattctccttttttcatctttaataagaatcaaaaatatgcgactggaagttatcagaaccagcattccggtaaacaaccgcttgaatttcggaatcagattgaatcttaatatcaatcggaatcccattaggtaggtacttctttgctgcccgggtaatatattgggtaaaactagtaatttcactttgactatagaactgagtagtaacagtaatgtgcatccccgataaagtcccattttcatattgagcttgtgctgtaactccactcaagttagggaagaaactttgaatctggctcttaaagtttgagaaactatcatcatcagtttgatcagaactattagttgttgatgcactagcctttggaaggactacattcttgtaatttaacttccgccagctactaattgtattaccactattcttactataagcaaagaatgtaccaccaactaaactatcatccggtgcttgtttgtatagtgcaatcacgattggaacatttccaacgcctgattttttccgtactcgttgaagaaccttttgtgccgcgatttcaccttgacgacgaacctcactatcactaatcttcttagttaaagttggtcctcctgtcttagtttggtagttgtattcggaatttattccaatcccaatcgtaatcccccgcaatttcatggaattaccactttcttgcatataatcttgctcttcaatttgttgaatatagactgggttaggattgctcttctttccttgagcagggtttagcccttcaggattactctttgtttttcgaccaagccagttttcaatcgtcccactactaaggtattgaccttcttggaaaatatagctttttgttgaaaagactcgttttgaaacctgggtcaaaccactttcaaagcttttaaggttatattggttatcattttgtgagacatttataccccgagctttacttgttcggtaacgaccatttttaatcacaccttgataagtaccattacttgaaccagtcgttgaatagtttttcgatgacgactttcctccaaaaccacatgatgcaagcaagacagtacacatcaaaacggcagcactaacggctattttttttgcctttcgcttcacgatttactgttcctccttcattgcttggctgaattgctgttcattccatacgtcaatacccaagtcttgagcttttgttagcttactaccagcatcagccccagcaatgacaatatctgttttctttgagacgcttccggttaccttagccccgtggttttcaagccatgattttgcttccccacgagtcatttcagttagcttaccagtcagtactactcgccgaccattccattcactatcaggattagcatttgaccgtgagccaagataagcaaagtttaccccaacttctcgtaattcgtcaattaatttaataacctgttgattagcaaaataagttacgatactttcgccaattgttggaccaattccactaatcgcagaaatttcatcggcatcggccttcattaagctatcaaggtcaccgaaatgttccatgataattcgagcagcctttgcacctacatgacgaattccaagaccaaataataagcgctcgacagaattattacgactattatcgatcgatgtcaataggttagaggtcgatttctcgccaaatttatctaaagttaataattggtcatgattaagtcgatataaaccggcaacatcatgaatcaattctttatcccatagctgttcaatgattctaggaccaagtccatcaatattcatggcattccgggaagcgaaatgtgctaagccttctttaatttgcgctggacacattggattaatacagcgtaacgcaacttcaccatcaagatgaactaattctgagccacagaccggacacttcgttggaatctcatattcaactgaatctgcagaacgtttagttggatctacttttgaaatttcaggaataatgtcacccgctttatgcaggtaaacagtatcaccaatccgaatatctttttcacgcaagtaatcaggattatgcaaagaagctcgactaactgttgtacccgccaattgaactgggtccataactgctgttggcgttacattgccggtccgaccgacagtccagacaatatcacggacaatcgttgcttgctcttcgggagggaatttataagcaatttcccagcgtggcaccttaactgtattcccaagggcaacttccgtatcaaggtcgtttactttttcaacaattccatcgatcccgtaagtgagcttgtctcgttgagctgtatattcttcaatatacttctcaatctcttcacggttatgaacaactcgattattaggattaacattaaaccctaattctcgcatacgatcaagtgcttccgcttgggtcttcacccccaacttttgatattcaggaacataatatataaatgtatctagttcacgttgcgccgttactttcggatctaattgccgcaaacttccggctgctgcattccggggattagcaaaaaccggcaatccttctgcttcgcgtttagcatttaactttgcaaaagccgctttgggcatataacattcgccccgaacctcgatcgataatggttctggcaattctgcgggaactgacttgatagttcggacattagcagtaacatcttcaccaatcgttccattgccacgcgtagaaccttgaactaactttccattctcgtaaacaagtgaaagagaaagaccatcgatttttagttcgagattatattcgggttcaacttcaacatcccgattttcctgttgtcgttggttaaagtccatcaattcttcaatcgaaaagacatcccccatcgataacatcggaatttcgtgccgaacttttgttaattggctttctgttgctcctcctactcgttgggttggcgaatcggcagagagcaattgtggaaattgttcttccagctgtactaatcgctgataagcacgatcatatacatgatcctctacagttggattgtcttgttcataatattcttttccccacttaatcaattttgctcgtaatggcttaatctcatcttgagcttcttgaagggttaattcttttactggcgtctgtttttcactcatctcatccgcctcatttcattattttcgtactttcgtaattggggcaaaacttgccaataaccgctttacaccctgacttggaaaggcaatatctaattccatatcattaccactaccgttaactttgaccactgttccttggccccactttttgtgttcaaccttatcgccagttttccagccaaccttatcggccccagttccggtgttagtaattggtttaacccgcttgccagcactgcgatatgttcgcttttgctgatcacggtaggtagtagcggttgcggcagcacgatcaaatggcagtttactatctttaatgctattacctgatgggctattttcaaactgtaacaactcagaatcaatttcttctacaaatcgtgatggttggttacgttggatacgaccataaagcaagcgtgaaaaggcattagtaagataaagctttttctttgcccgtgtaattccaacataggctaagcgacgttcttcttccaattcatcatcttccattaaagctcgcgataatgggaaaataccttcttccattcccacaaggaaaacaactggaaattcaagtcccttagctgcatgtaatgtcattaaagttacagctggtgcttgttcatcaacatcatcttgatctgagacaagggccaaatcagctaaaaagttaataattttttgcaagttaggatcatcatcgtctttatgctgctcatcatattcttgtgtaaccgacttaaattcatcaaggttttcacgacgagcttgtgcttcaaggcttcgatcatcacttagcattttgttgtagccacttaactctaaaatctgttcagttaaatcagttaatgtgagatattctgcttgtttagtcaagttagccattaattgaccaaattcatcaattttatttcgtgttcgtgcagtaatttcactagcagtatcaacattttgagctgcctttaataatgtccagccattttcattagcgaaattgcgaagatgttccacactagttaaaccaattcctcgtttgggcgtattaacaacgcgttcaaagctcattgaatcggcaggattaacgattaaggtcaaatatgctaaaatatcacgaatttcacgccggtcatagaatttatggccaccaaccatcgtatagggaatactactcttcaagaaagtttcttcaaccatccgtgattgtgcattagtccgataaagaattgcaaagtcattaaagtgatagccatgcttttcttgttcttctttaatcttcgaaacaataaactgcgcttcatcatgttcattttgcgcgcggtaatacgaaattttgtccccttgaccattttctgtccacagattcttcttttttcgataaaggttattagcaataacttcatttgccgcatttaaaattgtttgcgttgatcgatagttttgctcaagcattaccgtcttagcttggggataatcatgttcaaaattcaaaatattgttcatattagctccacgccaaccataaatactctgatctgcatcccctaccacacacaaattttggtacttttgcgctaatagattaactaaccggtattgggcatcattcgtatcctggtattcgtcaacatggatgtagtggaacttatcttgataaaattcaagcgtctcttgatcactttccaataactcaatggtcttcataatcagatcatcaaaatctaatgcttgattagtttctagctcttgttggtaaagcttatatgctcgcgcgaccatgttttcaaacatactattagcttctttgctatagtcatctggcgtcaacaaagcatttttagcattagaaatcgcacttaaaatactgcggggatcaaattttttagtatcaatatttaattctgcacaaatccgcttcattaacgtccgttgctcacttgtatcagcaatcgtaaaggcgcgattatagccaattttttcaatatcacgacggaggattcgaacacataatgcgtgaaaagtcgatacccaaatctcattagcactttcaccaagtaatttaccgacccgctctttcatttcgcgcgcagccttgttggtaaaagtaatcgctaaaatattccatggtaatacaccattttcttcaattaagtaagcaacccggtgtgtaagaacccgtgtctttcctgatccagcaccggccattactaataatggtccctctgtagttaatactgcttcggattgcttatcattcattccttctaataatgcttgcccgttattcacgctgttccatcctctctaaattttcatcggctaatattataccaaattaggatctcatttggtgctaaaatcgaacgtatgttaggaaaaataaagagactgcgatttcatccccagtccctcgtaatcttgtacgcttaatttataatttcgtgatcaagcttgttcgttccaaacttcagtatcgtcaacctgattctttaaggctgccaagttatcgccgccagttacccagacaaagcctagaattgcctgatcgtcatccccaacatcattaaagaacctaaattgccagttattctttagcaaccattgccgttgaattgctcgtgattgataattgcgaacgaccatcaataagccaatttgtaatggtgtaataacatgtaggggcattccaacagtgcttcttaattgttcttcatactggtcaacatttgctgtgacatcataaatattagcaatcgacgttaaccctggttcaatattctttacataaagagtaccagtagaagtaacataaaagttaaccgaaaataccccccgatattcaagagatgccgcaacactttttacaatccgttgcatctcttttaacatatcatcgtgaatatttgctggtgtcgcaacagaaatcaattggcgcttgtcattgtaatgaagctgagcaagtgggaaaatctctgtatcttttccatcagttgccgctgtcatagtatattcatttgtatgttcaatccacgattctagtaaatatgtacccgtatcaataaaatcagcggcgcgagtaatatcagattggcgctcaatcagcattgaattttccccaattcctcgttgaatgggttttaacaacgcaggatagccaatggaatcgattgattggtaaacatcatctaaactaaccaccgtcatatatggagcaatattaatatttacctgatctaagaaagcacgttccattaatcggtcttgaacaatctcaagagcattaatcccctgaggaatcactgcatattgactcaaaaagtgcatgacgcgagaatcgacattaggggtttgataaataattgcatcacatgcttcaccaaactgagttagttttgtccgatcgttcattgcccctacaatggtaaagtcagccattttagttactaatggctgagaacgatccacatacacaccaacgttaaagcctgccttcttcgctgttgcaataagtgctgccccattgcgattaattccaataattcctaaagtactacctgggtaaatagcatctctgcccattttatcacttcccttattagtcttttacgaattcaactttattatcactcaatgattgaattcgtgccaatgattcgacacgaattccacgttcttttagttcaccagctccaggttgaaaactcttttcaataactattcctgcacccgctacttgaacccctgcttgatcggcaatttctaataatccctctactgcttgaccattagccaagaaatcatcaatcattaaaatcttatcattagcatctacatactttttagaaattgaaatccgattggttgttttcttagtatacgaatatacatcagcagtatacatattttggttaagagtaagactcttatgcttacgagcgaaaataactgggagattcatttccaacccagtcattacagctggagcaattccggatgattcgactgtccaaatcttagtaatgccttcattagcgaaaagcttggcaaattcttgaccgatatgcaacattaattgaggatcaacttgatggtttaaaaaagcatctacttttaaaacattacccggtaaaacagtcccgtattccttaatcttttcttctaactctttcatttttgtccccctctacattactcattacttatcataattatataatttatacgccttaatcaccgaaattaatttttgtgcataatcaggatcagtcgcataacctgcttcttgcaatccccgagctgcttcttgataattagtcgcatggacaactcgatcataattttgctgattggtgtctgttccatttaacatcaagcgcgtatggtctttaatagaatcactccaactatcataaacgcggaatcgtcccttagtaacgatccacttaccattaatatattctttagttgtcattactcgtgaatttgctcccgttcccttaattccaaataaattatgatattgtgacgctaactgactcgttccccattgagattcaagaatcgcttgggcaatcgtaattgatgcatagatatgataggtattttgcattgcctgggcttcaggagcaacttgctgaataaataattgcttcgctcggcgatccttttcacgtgcctcttgttcaattcgttgctgattccagattcggtaaaaatggtgcccaacgtaaacacccaaaaagataacaataacagcaagaatgctaataatccaatttctacccgtatggcggtttttgtttctccgcttccgttttgccacaagcttagcctcctcttttctactagttattaattgtagcaaaatccatctcgtttgggttaatttatcgtaatatttttagaagaagttaaaaaagcacaactgaaaaattttttccagttgcgcttgctgctactagccttaagtattaatggaattgcattccaccatcaacaataattgtttgtccagtaacgtaatttgaatcaggaccagctaagaaacttaccacattagcaacatcctctggttcagaaagacgcttcattgcaatgttcttggcaaaggtttccattccccattcatcacttttaccagcattttgaccaacttgatgtgcaatatcatacatcatcggtgtcttaacgattcctggtgcaaaagcatttaccgtaatatcttcagttgccaaatcttgagctacgacctgcgtaatgcctcgaatagcaaattttgttccagaataaagtgcaagattaggattaccaacaacaccagcttgagatgtagcattgataattttaccaccatggccaagctccttaaatgccttgtgggcagcttgaattccccataaaaccccagcaacatttacaccatatactttttcaaattgttcaggtgtaattgaatcaattggggtagtaggacctaatccagcattattaacgattacattaagatctccaaaatgttcgactgtcttctcaacagctgcaaacacttcttctctatttgctacatcggctacaagtggtaatgcttccccaccattattagtcagttcatcaacaacttgttggagctttacctcgtttaatgctacaagagcaactgcaaagccatccttaaccaatctttctacaattgccttaccaattccttggcttgctccagttactaatgctacctttttagtcattagtaatccctcctttatattagttatcatttattataccgtatattaaattccgtttaaatataaaaaagacaccagcaaaatactgatgtctctggaagcgataatcgaaatattaacgcttactgaattgagcagccttacgagctttcttaagacctggcttacgacgttccttcatacgagggtcacgagttaagagaccagccttctttaaagcgtcacggaagtctggatcaacagcgagaagtgcacgggcgataccgtgacgtactgcacctgcttgaccagagaatccaccaccattaacgttagctaaaacgtcgtattgaccttctgttttagtaacagcaaatggttggttaacgatagcacgtaagttggcaaatggaatgtagtcttcaattgccttgccgttcatcgtaatcttacctgaacctggtactaagcgaacacgtgcggttgcatccttacgccgaccagtaccactgtattgtacttgttgagccaattccattccctccttagattaagttagtaatgtctaaaacttctgggttttgtgcagcatgtttgtggtcttcaccagcataaacatgtaacttcaaaccttgcttgtgaccaagagagttgtgtggaagcatacccttgatagcagtttccaataacttctctggttcctttgcaaggaagtcaccagcagtccgttgcttcaaaccaccagggtagtttgaatgacggtagtacatcttttgagatgctttcttaccagttaacttaacttgcgcagcgttgataacgataacgtaatcaccagtatcaacgtgtggagtaaatgttggtttgttcttaccgcgcaaaattgatgctactgcagatgctaaacgacccattgggacattcttagcatcgacaacgtaccatttgcgttcaacttcaccaggttttgcgatgtatgtcgttctcacgattaagtcctccaattttgtttttctttacatataatagtgtaccgagttattagatggaaaagaaataccaatggctagtataccttcttctagtactttcgtcaatccttttcatcatttgttccataatctacattaactaaatataaaccacttgctggagccgtcatccgtgccaatgtccgatcctttgcctcaaggactctagacacgtcatctactggccgctgattgctcccgatttctaaaagaaaagccaccattattcggacttggttatagagaaaaccattaccagtaaaatcaaagacgacttcatttcttaattcatctcgtttaatcgtgatactctcaatcgtccgaacattgctttttgcttgactccccgacgcaacaaaacttgtaaagtcatgagttccaactaaatcattagctgcttttctcatcttttctaagttaagaggatatttaaaatgagaagtatagttgcgtttaaatgggttcacaaattccccctgatcaacccggtaacgataagtcttacgatgagcactgtatcgcgcatggaaatcattatccactaattcggccttcttaattaaaatatccagtggcaaaatactattgagggcttttctcatagattcattacttaaatgatagggaatatcaaagtgcgcaacctgattaagagcatgcacccctgcgtctgttcttcctgagccgataacaggaatagcaggatttgggtgcttagcaattttatttactgcattctttaatgtttgttctactgtccgcttatttggttgaatttgaaaaccggaaaaattggttccatcataagcaaaggttattttataacgatacattgtttacttccttattaatttagaaaaatattcgaatacaaactagaccaactgtcacaatcaatagcgccaagccagcccaagcatcatttttatgccaaactaattgacgataatgagtccgtggtgcattaggatcataccctcgtgcttccattgccgttgctaattcttcagcacgcttaaacgagttgacaaacaatgggataagaatcggaactaaatgtttaatccgtgtcaaaagatttccagcgttaaaattaatcccgcgggcccgctgagctttcataattttattagtttcatccataatagttggaacaaagcgtaatgcaatggaaagcattaacgtaatctggttgacaggaactttaatcacttgtaatggtttcattaaccatgccaaggcatctgcaatttgaaaagtttgcgtagtggcagttaagacagttgaggcagtaataatcaaaataaaccgataaaaaataattaatgaattaataaggccgtcacgggttattgccataattccccaatgccaatacgtctttccgccactactaaataaaatttgaaacgctactgttatcaaaataattaaaaataacggcttaatcccttgccaatattgtcttaaaccaacattacttaacttaattgccgcaaggagcgctaataaaagccatatagcagctaaaaaattattcacgaagaaaattaaaataacgtaaataatacacatgattagttttattcgtggatcaagacgatggaggatcgattttactggtacataactaccaaatacgattttactattcattttctttttctcctcatcgcttctgctatttcatctgctaacacatcaagcgtaagcggttctgtattttttaaggttatcccatctttactaaggaattgcgcaacctcgacggaaacaggcaaagtcaatgatagtttttttaatcgttgagcatccctaaataattgctgaggagtagtatccgcaacaatctgcccattgctcattgcaattacgtggttagcataataggccacctgctccatttggtgagtaaccattataatcgttgttcccttctcgttaagatctttaataagtttaagtaaatcattagttgcttgagtatccagtcctgctgttggttcatcaagaattaaaatttggggatccattgctaaaacgccagcaatcgctactcgcctcatttgtcctccagaaagtgcgaaaggggagtgtgactttaattctaagggcaaatccaccatttttaatgcttcatcaactgctttttcaattttttttgcaggccaccctaaattatgaggcccaaaagcaatatcctccgcaactgtttctgcaaatagttgctgttcaggaaattggaatacaaaaccgacttgatggtggattttacttaaatattcagtttttgtcgttgcattaatttctaaacctgctacattaagttccccactactgggctttattaatccatcaattaatgaaaccaatgtcgactttccacttccggtttgtccaataatagcaacaaattcttgctctttaattgttaatgagacattatgtaaggcttcattagtagaattaggatatgtatagtggagtttttttactgtaattgctgctttagccaattttttagctcctctaaatttaaatatctatttggaacattaattcctcgttcaaccaataatttctgcagttgctggcttgcgggaattcctactccaatttcaagtaataattctttatctttaaggatttccgatggagcaccttgttttacaacttgcgaatcatttaatacaactattttgtctgctaattcaatttctttaagatcatgtgtaattgaaataattgaaagattatattctttttttaatttttgtaataaagctaaaatttcttgtcgtgctaaaggatcaagcatactagtggcctcatcaaggattattatcttaggcattaatgcaaggattcctgcaagtgctacccgttgcttttgtcctcctgagagattaataggagctgtgtttttataatcactcattcctaccatctttaaggctttatcaatcttttcctccattttatttcgatctacttgtcggttttcaagtccgaatgcaacatcgtcagcaacggttgctcctacaaactgattttcagggttttgaaaaacgaatccaatatgctggtgaatcttgcctaaagaactttcgttaacttgtatttcgtcaacttcaatcgatcctgcagtaggactaagcaatccatcaattaatcgggctaatgtactctttccactaccattatgaccaataatcgctgtccaagaaactggttcaaaatccagattgatattttttaaaacggggtatttactgtctggatatgtaaatacaagttttcgaatctttattccagtcacagtatttcctcttttcaatattagttaataagtatattttagcaaagtccacagaattatctatcaaaattaaatttaaaataaaaaatcacttaccattgaagtgcacgagggtttcccgcattcaagctagactagggtttccccaccatcgtaacgctctatactatcaatgatagtgattctttattacgtatttaatttatgtgaacaaatcaattagtccactaattcaagaataaccattggtgcaccgtcaccacgacgaggcatagtcttcaagatgcgtgtgtaaccaccgttacgatctgcatactttggagcaagttcttcaaaaaggttttgaagagcagattgtacacgaatatcatcgccatcttccttaacatcagcaacaacattacgtacaaaagcggcagccttacgacgagaagctaaatcaccatgcttagcaagtgtaatcatcttatcagcggtcttacgaacttccttagcacgtgcttcagtagtggtaatacgaccattaacgattaaatctgtggttaaatcacgtaataaagccttacgttgtgaacttgtacgtcctaatttacggtaactcataaagtggttccctcctttgcaattggtatactaattagtcgtcttggcgaaatgaaacaccaagatcatttaatttaagtttaatttcttctaacgacttttgtcctaagttccgaaccttcatcatatcagacactgttctatcagttaattccttaacagtattgataccagctcgcttcaaacaattgtaagaacgtacagagagatcaagctcttcaatagtcatttcaagcatcttctctttgtgtgtttcttctttttcaaccatcacttgagcattttgagccgtttctgttaaatcaacaaacatagctaagtgttcagtcaaaatcttcgcacctagactaactgcttcagttggtgttaatgaaccatcagtccaaacatccagcgtcaacttatcataatcgttacgttgaccaacccgtgcattttcaacagtgtaatttacacgttcaattggggtatagatggaatcaatcggtaaaacaccaattgctaaatcatccatccgggccttattatcgttagcagaaaggtaaccgcgacccttatcagcagttaacttgatgtgtaattctgcgccatcagcaacagttgcaatatgcagatcaggatttaagattgtaacttcattatcaccctggatatcacttgcagttacttcagcaggtcctttaacatctaattcaagattcttttgatcctcagaatcaagcttcaaagaaactttcttaagatttaggataatctgcgtaacatcctcagttacaccttcaacagtgctaaattcatgtaaaacaccatcaatttgcatactcgtaatcgctgcacctggtaaagatgcaattaatacacgccttaacgagttaccgagagtggttccataaccgcgctcaagtggttctacgacaaacttaccgtagttatctgtttcttcaactttgtgaatatttggcttttcaaattcgatcattctatccttgtacccctttcaaaacgtggttcgtatttgagacaaaaaggcaattgatggaaataattgtctccagcaatgtcaattaaacacgacgacgctttggaggacgagaaccattgtgaggaacaggtgttacatcacgaatagcagtaacttccaatccagttgcttgaagtgcacggatagcagcttcacgacctgaacctggacccttaacttcaacttcaacagtcttcataccatgttccatagcttgcttagcagcagcttctgatgccatttgagcagcaaatggagtggacttccgacttcccttaaagcctaaaacaccagctgaagaccatgctacagcgttaccttgaacgtcagtaatcatgatcaatgtgttgttaaatgttgagtgaatgtgcgcaacaccagtttcaacattcttttttgcacgacgcttacgcgtaccttttttggttgccatatctagtactaacctccttttttataaagttaaactacttcttcttattagcgatagctacagccttacccttacgagtacgagcattgttcttagtgtgttgaccacgaacaggtaggccacgacggtgacgcataccacggtatgatccaatttcttgaagacgcttgatattcattgaaacttcacgccgtaaatcaccttcaacttgaatttgatctacttgtgcacgaatcttttcttcttgatctggagttaaatcacgaacacggatgtcttctgatacaccagcattttcaagaatcttcttagcagtagaatcaccaataccaaaaatatatgttaagccgactacgattcgcttgtcacgaggtaaatcgacacctgcaatacgagccatgagctacacctccatttctctataaaataaattacttaccttgacgttgcttatgctttgggttagcagagcaaataaccataacacgaccgttacgcttaacgatcttgcagtgctcacacatctttttaacagatggtcttactttcattctaaaatcctcctattgagagtaattgatcaataactacttgaaccggaaagtaatccgaccctttgtaaggtcatatggagacatttctactttaacacgatcccccggtaaaattttaatgtagtgcatccgaattttaccagaaacatgtgctaaaatttctgctccgttttccaattcaactttaaacattgcattaggcaaagtttcagttactttaccttctacttcaattacatcggcttttgccacgaaatagtacctccttgcctattctagatattacgtaaaaatggtggaaagtataaaacttcccactactcagatagataaaccttgcatagtttagcatatgtttacaaacttcgcaagagataactattatctagtttaggtttgttaatactttcttgatatcttcgtaaactttatcgatatcttgttcaccattaatttcgtgcaaaacacctttcttttggtaatagtctaccagtggtgtgttcaacttaatattaacatctagacgattcttaaccgtttcaggcttatcatcatcacgctgataaaattcatgatgaccacaaacgtcacatgtgccttcaactttaggaacattgtaaagcttatgatacgttgttccacagttacggcaaataaaacgtccacttaaacgttctaccaatacatccggttcgacgtgaatattgatcacagcatcaagatgccgattactctctgctaacatcttatccaaagctgctgcttggttaagattacgaggaaatccatccagcataaagccatctttagtatcatcttgagctaaccgttccttaacgataccgttagtaacttcgtccggaacaagttcacctttatcaatatatttcttagcttcaattcccatgggagtttcattttttatggctgcccgaaaaatatctccagttgagatatgaggaattggaaaatcttcaacgatcttttgagcttgagtacctttaccggcacctggaagacccattaatacaagattcatactcattagtcatttcctcctttaggttctcgaataaatccaatatattcgcgcttcattgttagtccgtttaactgccgaacaacatctaaagcaatttgtacgataatcagtaagcttgtaccacctaaaccaattgactgacttaggttccatacgttacttgcaattaacggaattaaggagatcaatcctaagaataatgaacctactgtactcaatcgcattaacaatgaagaaatatagtcttgtgtaccctttccaggacgcactccagaaatataacttccttgcttttgcaaattctcagcaagtttttctgggttaacctgaacaaaggcatagaaaaaggtaaatacaacaatcaaaaatacatacagtgcgatcccaggaccagattgcatgttaaaaatggtcgtcatgatttgataccaactatccccaccatggttttgctggaaagccataagaatagtttgcggggttgagataaaagaaccagcaaaaataacaggaataacacctgatacgttaatcttcaagggaagataactactggatggtgaagtagtggttcgtcttgtgtattgaattggtagacgtctttctgcctgttgtacccatgtcacaaacgctacaataattaaaattgcaacaataacaagagtaacaaatccaattcccatccacaaagcagaaccagattcaccagcaatttggtcatcccataactgacgaattccacctggcatttgcgcaacaataccagcaaaaattaacatggaaacaccattacccaagccacgttcagtaatcatgtctcccatccaagtagcaaacattgtacctgcagttaaaattaaaccgattgttaaatacgtttgaacaccaggatgattaaccaaacgaatagtactcaatgcattaaacccggcggtaataccgattgattggataaatccaagtacaatcgttaaccatcgggttgcttgattaagttttcgccgtcctacttctccttgtttactccattcaacaaaacgcggaacaatatccatttgtaatagttgaacaacaatttgcgcagtaatatatggagaaactcccattgcaaataaagagtaattctccaatccaccaccactaaaggtattgaggattgatgctaaaccggttgaggagatttcctgcaaagcagcagcgttaactccaggaacggtaatcgctgccccaatccgatagacaatcaatacaaacaatgtaaagaaaatctttttacggatatcttttaccttgaatgtatttttgacggctgtgaacaaactacatcacctcagttttaccaccagcagcttcaattgcagaaactgcagaagcagaaaacttattagccttaacagttaatttcttttcaagcttaccgttaccaagaatcttgatgccgctcttcaagttcttaactaagccactttccatcaataattgtggagtaacttctgtaccatcatcaaacttgtttaatgatgccaagttaacaattgcgtattctttccggttaatgttggtaaatccgcgctttggaatttgccggtaaagtggcatttgacccccttcaaatcctaaacgggtctttccatgagccttttgccctttagtaccacgtccagatgtaaaaccgtgtcctgatgaaagtccacgacccttacgaagacgcttagaacgagaaccagcagctggcttcaattcgtttaacttcattagtaggcacctccttattatttaattttaattacttaacttcttcaacagaaaccaagtgagcgatcttaaaaatttgaccgcgtgttgccgcattatctggtaagataactgagctattgatcttacctaatcccaatgccttaacagtacgacgttgagtaggttgtcggtgggcaacactgtgaattaaggtaacttttacttgagccataatttagtgccctccttattctgctaagtggtctactgaaacaccacgtaactttgcaacttcttcagcgttctttaattgcttcaaaccttcaaatgttgcacgaacaacattaacaggtgtgttagagccaaggcgtttagaagtaacgtccgcaacaccggcaaggtccataacattacgaaccgcaccaccggcagcaactccagaaccttcaacagctggctttaacatgatctttccaccgccgtatacaccaataacttcgtgtggaatagtagttccaacgataggaacagtaatcaagttcttttcagcagctgcttgagctttacgaatagcttctggaacttcttgagccttaccagtaccaaaaccaacatgacctttacggtcaccaacaattactaaagcagcgaaacgcatacgacgcccaccttttacaaccttagtaatccggttgatggctacaacttgatcgtctaaatccaactttgttggatcaatgaattctgatgatgccattgcaggttattcctcctttttttagaatttaagtccgttttcacgagcagcttcagccaaggcttgaacacgtccatggtaaaggtatccaccacgatcaaacacaacttcagtaatgttcttttcgttagcgcgtttagcaattaatgctcctacaccactagcttgttcagtcttagtctttccacttacttcactatcatttgtggaggcacttgcgagcgtcacaccctttacgtcatcaattaattgagcgtaaatgtttttgtttgaacggtaaacacttaagcgtgggcgctccgcagtaccagaaatcttaccgcgaacgcgtaaatgacgacgttgacggatcttgttcttgtctggtttagaaatcacaacagtcacctcttattatattaattatattaaataaaagaatgttaaataatcttctcagattacttaccagtcttaccttccttacggataatgtgttcgttttcgtaacgaatacccttacctttgtatggttcaggtgaacgtacagcacgaacttcagcagcaaaattaccaaggtgttccttgttaattgagcttaattcgatagtagtattgtcaggtacgttaatttcaacatcttctggcttatccatttcaactgggtttgagtaaccaacagttaaaatcaacttgttacctttgagttgagcacggtaaccaacaccaacaagcttaagaaccttcttgtaaccattaacaacaccttcaaccatgttgttaacattagcacgagtagttccgtgtaacatctttaacttattagtatcagcatcacgatcaaactttacaacgttaccatcaatagtcattttgattaatggtgaaatttcacgagataaagtacctttaggacctttaacagtaactacattaccatcttgagaaatttcaacaccacttggcaaatcaatttctttgtaaccaatacgactcatctttgcacctcctatctaatattcgttttttaccaaacgtaagcgataacttcgccaccaattttcttggcacgagcaactttatcagtaacaacaccttcagatgttgaaatgatagcaatacctaatccattaagaaccttaggcacagcatctgacttaacgtatgtacgtaaaccaggcttagaaatgcgctttaagccagaaataacacgttgaccgtcattaccgtactttaagaacacacggatgatgccttgcttgttatcatcaacgtattcaacatcgcgaatgaaaccttcgttttttaagatttcagcgatgtccttcttcatctttgatgcaggtgcttctactgattcgtgttgagccatgttagcattacgaatacgagttaagaaatctgcaattggatcactcatagacatcgatgttttcctccttttgtcggtttttttgtttaccagctagccttcttcaaaccaggaatttgtcctttgtgggcaagttctcgtaagcaaatccggcataggtggaatttacggtaaacagagtgcggacgtccacaacgtgcacaacgcgtgtattcacgacttgagaacttagctggacggttgcacttagcaatcattgattttttagccaatttgtggaacctcctttatttagcaaacggcataccgagttgagcaagtaattcgcgggattcttcgtcagtttgtgcagttgttacaataacaacatctaaaccacgaactcggttaactttatcataatcaatttctgggaaaattaattgttcatggataccaagagtgtaattaccacgaccatcaaatgccttgttacttacaccatggaaatcacgaactcgtggcaatgccacattaactaatttatctaagaaatcatacatacgttcaccacgcaaggttaccttagcaccaattgacataccttcacgaagacggaaaccagcaattgatttcttagccttagtaattaaaggcttttgaccagaaatcaagccaagttcttcaacagcttcatcaagattcttggagttagtagttgcatcaccaacacccatgtttaaaacgattttgtcaatctttggtgcttgcataactgaagagtagttaaacttttcaattaatgctggacgaatttcattttcgtatttagctttcaaacggttttccattagaagttattcctcccttccttaaaaattagtcaagtgtcttacctgacttcttcgcaacacgaaccttcttaccatcaacgaacttgtaacctacacgagttggttcatttgttgaaggatcaatcagcattacgtttgaagcattaattgcagcttctgtatcaataacgccaccattagggtttgagttgcttggtttttggtgtttcttaacgatatttacaccttcaacgataacgcggttttgagaagcaagtacctttttaatagtaccttctttgcctttatccttaccagcgattacgcgaaccttatcacctgttttaatgaacatgttgattgtgcacctccttattttcggtaaaatctttagagaacttctggagctaatgaaacgatcttcatgaagtcgtctccacgaagctcacgagcgattgggccaaaaatacgggtacccttagggctcttgtcgttgttaattaaaacagcggcattttcatcaaacttaatgtatgaaccatccttacggtgaataccatgtttagtccgtacaacaacggccttaacaacgtcaccctttttgacaacgccacctggtgttgcctgctttacagtagcaacaatgatgtcaccaatattacctgttttaactcgggaaccacctaaaatcttaataactaagatttcacgagcaccggagttatcagcgaccttcaaccgactttcttgttgaatcacggttaatgtcctccttccatttacaaataagaattagaatacgaataatttttagagttatctgctaaattaaagggtagcagctttttcgacaatctttacaagacggaaacgcttcttagctgataatggccgagtttccataatttgtacagtgtcgccggtcttagcttcgttgttttcatcgtgagcatagtacttctttgagtacttaacacgcttaccatagataggcgcactcttgtaagtatcaattacaacagtgatagtcttatccattttatcagaaacaacgtggccttggtaaaccttacgtgcattacgttcttcactcatgcgctaatcctccttttcgtattcttatttgtttaattcttgttgacgaagaactgtcttaacccgtgcaatatctttgcgtacttgcttaagacttgcagtattttccaactggccggttgctaattggaaacgtaagttaaacaattgttccttcagttccttttcacggtcaagtagcttatcagtggttaatccattcagttcttgtacataatctttacttttcattagattgtccacctacttcctcacgttgtacgatcttagtgcgaactggcaacttgtgaccggcaagacgtaaagcttcacgagcgacttcttcagaaacgccccctacttcaaacattaccttgccacgttttactggagcaacccatccttcaggagcacctttaccgttacccatccggaccccaacacctttactagtgtatgagagttgtgggaagattttaatccaaactttcccaccacgcttcatgtaacgcgtcatagcgatacgagcagcttcaatttgacggttgctaatccaatgtgaatcaagagcttgtaaaccaaattcaccaaaagtaacagttttaccacccttagcttcaccgcgcatatgaccacgttgaaccttacggtgctttacacgttttggtactaacatgtgttacttccctccttgttcatcattgtttgagttcttcttagtaggaagtacttcaccacggtaaatccaagtctttacaccaagaacaccgtatgtagtgttagcttcgtcccaagaataatcgatatcagcacggagtgtatgcaatggaacagtaccatctgagtatgattcgatccgtgacatatctgcaccgttcaaacgaccagcaacttgagtcttaatacccttagccccagcacgcatagcacgttgcatagccccacgcatagcacgacggaaagcaatacgagcttctaattgccgtgcaatactctcaccaacaaggtgagcatctaaatctggcttcttgatttccacaatgttaatgtgaacacgtttaccagttaatttgttaagttctttacgaagtgcttcaacttctgaaccacctttaccaataaccattcctggcttggcagtatgaattgatacgtttacgcggttagctgcacgttcaatttcaacggttgatacagaggcatcagcaagtcgcttttcaatatacttacggattcgaaggtcttcgttaaggtaatcagcaaagtccttgtcagcgtaccactttgcagtccaatcacgaatgaccccaacacgaaaaccattaggattgatcttttgacccactattcattcctcctatcgttctgtaacaaccactgtaatatgactagtccgcttgttaattggagaagcagaaccctttgcacgaggacggaaccgtttaagagttggtccttcgttagcaaaggcttcacttacaaccaatgaagcacgatctaagtcgaaattgttttcagcgtttgcaacagcagattttaatactttttcaacatctgaagcggcaccacgaggggtgaacttcaaaatagcaaatgcttcggcaacactcttgccacgaatggcatctaatacaagacgaaccttacgagcagaaacccgtaccatcttggcagtagccttagctgacgtaatgttttcagccatatgttatttcaccctccttacttacctgtcttcttgtcatcagaagcatgaccatggaaagtccgagtaggaacaaattcacctaacttgtgaccaaccatgtcttcttgtacgtaaactggcacgtgcttccgaccatcatatactgcaaatgtgtaaccaataaaacttgggaaaatggtagaacgacgtgaccatgtcttgatgacagtcttcttttcagaaccttcttgctccttaaccttcttcagtaatgaagcatcagcgaaaggtccttttttcaaactacgacccatttagtgtacctcctctcgggtattagaacgtatataaatattaacgagtatgtggaccgcgcttccgaccacgaacaatgaacttgtttgaacgagctttgtgtgaacgggtcttcttaccaacagtcttcttaccccatggagaaagaggagatggtaaaccaactggttgcttaccttcaccaccaccatgtgggtgatcgttagggttcataacagaaccacgaacgtgtggacgttgaccagcataacgagtacgaccagccttacctttaataatcaaggcgtgttcatcattaccaacagtaccgatagtagcacggcaagtagcaaggaccatacgaacttcaccagaagaaagacgtactaatacgtatttttcttccttaccaagtaattgagctgaggcaccagctgaacgagcaagttgaccacctttacctggttttaattcaatattgtgaataacagtaccaactggaatgttctttaaaggaagagcattaccaaccttgatatcagcatcaggaccagattgaacggtcatgccaaccttcaagcccttaggtgcaatgatgtatgatttagtaccatcagcgtaaacaagtaaagcaatatttgcagtacgatttggatcgtattcaattgccttaacagttgctggaacatcatctttaattcgcttaaagtcaataatacggtattgacgctttgtaccaccaccacggtgacgaacagtaatatgaccatagctgttacgaccagcagtgtgctttaacggagccaataatgacttttcaggtgttgtcttcgtgatttcagcgaagtcgtaaccgttcatattacggcgaccgttagtggttgctttatatttacgaattcccactgttttttcctcctttttttaatgattagttttcgttgttgtcgttaaacaacttaatttcatttgagtcggcagataaagtaacaatagccttacgacgacgcttagtgtatccttcgtaacgaccttggcgctttaacttaccttttacattcataatgttaacttttacaactttaacgccaaaaatttcttcaacagcatttttaacttgtgtcttagttgctcgtaaatcaacatcaaaagtgtaacgcttgttgtccataccagccattgaagcttcagtaactactggacgtaaaataatgtcgcgtgcttccattatgcgagcacctcctctacttgagaaagagctgacttagtgataacaatcttttggttatcaacaacgttcaagatgttaacacctgctggagtaacaactgtagcattagctaagttacgtgctgataaagcagcattcttgtcgtcatcagtaacaacaactaatgtcttttcagcaacgtttaagttacccataacatcagcgaattcctttgtctttggtgcatcaaagtttaatgcatcaactactacaaagctgttatcaagaaccttttgggaaagggcagacttgattgcaagttgacgaaccttacgaggaaggctgtacttatatgaacgtggagtaggtccaaaaacaataccaccaccacggaattgtggagaacggatagaaccttgacgagcacgaccagtacccttttgacgccatggcttcttaccaccaccgctaactgcagaacgattctttacagcatgtgtaccttgacgtaatgaagcacgttgacgcaaaattgcatcaaatacaacattttcatttggttcaacaccaaatactgcatcgtttaattcaacagtaccgttttggctaccatcttgtttatataaattaacgctagtcattatttacttcctcctttcttcttatttattgtgttgtttgctaagactcttcttagtattagccttaactgagttcttaatagttacgtaagacttgtttgcaccaggaacattacccttgatgagtaatacgttgttgtcaagatcaaccttaacaacttgtaagtgttgcatggtaacagtcttgccacccatacgaccagggagcttcatacctttgaaaacccggttgataatggcacccaatgaaccaggacgacggtggtaacgagaaccgtgtgccataggtccacgagattggttatccttatggatgttaccttggtaaccatgacccttggtagtacccgtaacgtcgacagtttcaccttctgcgaaaacgtcagccttaacttcgtctccgactttaatgtcccctaattcagcgtcgcggatttcaccgatgaagcgcttaggggtcgtgtttgcttttgctgcatgaccttgttcaggcttgttgctcaaaacttcccgcttgtcatcaaaaccaagttgtacagcactgtaaccatcgttttcaacggtcttaatttgcattacaacgtttggtgtaacatcgataacagtaactggaactaattcaccattgtcagtgaatacttgagtcattccaacctttttacctaagattcctttggtcatgagtacacctccaattttatgttttatgtattattcttattctaataattaaagcttaatttcaatatcaacaccactaggaagatcgagcttcattaatgaatcaacggtcttaggtgttgggtcaacaatatcgattaaacgcttgtgtgtgcgcatttcgaactgctcccgtgacttcttaaatttgtgtggtgaacggataacagtatagatagtccgttcagttggtaatggaataggacctgaaatttgagcacctgtccgcttagcggtttcaacaatcttatcagcagattgatctaaaatacggtgttcataagcctttaaccgaatacgaatcttttgttttgccattatgttccctccttcgtcagatttgaaatttgactagctccgcggaaattaccgccacatcctgtggcaaagcggccgggtgtgtcgcaaccttccgcatcaacgcttcgcagctttcacttaatagggggtaaggcaaatctacctccaaagctcaagcacttatccataatactaaagaaacgtaattagatcaagggaaattttcgaatattttcaattgaaatatttttgtaaaattttcttcctaagttagttaaaaattagcgatactaaaataccattaatttttctgatgtattaaaaagtaatttatttgttttgacgaaattcattaaaatgctttttgaatttttatcatcaaacaaaaaagaactacagtaatcaaactgtagctctttgatggacttgagatcacaatgtcaataattagttattgccaccgtttttcttaataatatcttcttgaacagacttaggaacagctgagtagtgatcgaaagtcatagtgaaggtaccacgaccttgtgttgctgaacgcaatgcagtagcgtatccaaacatttcagaaagtggaacaaatgagtggattaattgagcattaccacgttcttccataccatcaatggtaccacgacgagctgttacttgacccataacatcacccatgttgtcttgtggtacaacaatgtcaaccttcataattggttcaaggataacaggatctgctttcttagcagcattcttaagtgctaatgatgcagcaaccttaaaggcggcttcactagagtcgacttcgtggtaactaccatcataaagtttagcatgcatgtcaacaagtgggtaacctgcaagaacaccattttgcatagcttcctttaatccttgttcaacagcagggataaattcacgaggaacaacaccaccaacgatggcatcttcaaattcgaatccttccccttctttaagtggtgtaaattcgatccatacatcaccgtattgacctttaccaccagattgacgaacaaacttaccttgagcacttgcagtcttagtaaatgcttcacggtatgaaacttgtggcttaccaacagtaacttcagcgtggaattcccgacgaagacgttcaacaataatgtccaagtgaagctcacccataccagcaattaaagtttcaccagtttcaggattagtttcagccttgaatgttgggtcttcttcagcaagcttttgaagacccttgtccatcttatcttggtccgccttagacttaggttctacagaaacttggataacaggttctgggaagtccattgattcaagttgaagtggatggtcaggatcagttaatgaatcaccagtagtagtgttcttcaaaccaatagcagcagcaatatcaccagagaatacttctggaatttcttgttgttggttagagtgcatttgaagcaaacgaccgatacgttcacgcttgtccttagtagcattaagaacgtatgaacctgattgaagtgaaccagtgtaaacacgtaagaatgtcaaacgaccaacgaatgggtcagtagcaatcttaaatgctaaggcagcaaatggcttatcatcaccagctgttaattcaatttcatttccatcagcatcatgagcaacgaatggcttaacatcaagtggtgatggaagataatcaataacagcatcaagcatcatttgaatacctttatccttgtaagctgaaccagctaatacagggaaaatttgttcttccaaagtacctttacgaatagctgctttgatttcatcaacagaaatttcttcaccttcaaggtacttttccattaagttatcgtcaatatcagctaatgtttcaaccatttcgtcatgacgcttttgagcttcttccttcatatcatcaggaatctcaacagtatcccagttagtaccgagcttatcttcgtcataaacataggcaaccatcttaacaaggtcaactaaaccgataaagtcatcttcagcaccaattggcatttgaataggaagaggagtaacattcaaacggtctttaatagtttgaactgagtaatcaaagttagccccaatcttatccatcttgttcgcaaaaacgatccgtggaacgttaaattggtcagcttgacgccaaacagtttctgtttgtggttcaacaccagcttgagcatcaagaactgttacagcaccatcaagaacacgtaatgcacgttcaacttcgacagtaaagtccacgtgtcctggagtatcaatgatgttgatccggttatctttccaaacagcagtagtagctgctgacgtgatagtaataccacgttccttttcttcatccatccagtccatttgtgaagcaccatcatgggtttcaccaattttgtgaatcttaccagtgtaatatagaatccgctcagttgcagtcgtcttaccggcatcaatatgtgccatgataccgatgttacgagtcttagcaagtgggtattcacgtttattagccatcttaaaagagtatctccttccgaaatatggttatccttattttaccattattttcaaaaaggggtgacgtaatcgatgtttgaacgtcacccccttcactgaaactagttaaataaccagaatcaaatgacagtgattattaccagcggtagtgtgcgaatgcacggttggcttctgccatacggtgcgtatcttcacgctttttaactgaagctccagtattgtttgaagcatcgatgatttcacgtgcaagacgttcaaccattgtatgttcaccgcgcaaacgtgcgtattgaacaatccaacgaagacctaatgtagtacgacggtctggacgaacttcaatcggaacttggtagttagaaccaccaacacgacgagccttaacttccaagacaggcataacattttccattgcttgttggaatacttcaactggatcattaccagtttcgttcttaatttcatcaaaagcagcgtataaaatcttagtagcagttccacgcttaccatcaatcattaagtgatcaattaagctagtaaccaactttgagttgtacattggatctggtaaaatttcacgcttttgtacatgtcctttacgtggcattacttaactcctccttaaaattacttcttatccttaggcttcttagcaccgtacttagaacgtgattgcatacggccttcaacaccagcagtatctagagtaccacggatgatgtggtaacgaaccccaggtaaatccttaacacgaccaccacgaattaaaacaactgagtgttcttggaggttgtgtccaataccaggaatgtaagcagtaacttcgattaagtttgaaagacgtacacgggcgtacttccgtaaagctgagttaggcttcttaggagtcatagtacccacacgagtagcaactccacgcttttgtggtgatggagtcttaatttcttctttcttgaaagtgttgtaaacataaccaagagctggtgactttgacttgcccttgtggctcttacggcctttacgtaccaattggttaatggttggcattattttttccccttccttaatttaagtccacacatccaggcggttcttttttatggataaaaaaagtcctgtatgtatttatacaatttttgtgccttcgttgacgcatctgcccaacgacagacactccgttgctaaaaaagcaccttaaatagactatcatgctcacaaatgaatgtcaacgtatccttatcgatttcttttaaatcgttaatttaaaagtgaatttcattaaaaattacgtatttatttattgggaggtttttcatgttagttttattatttttatttggtgcttctgtcgcttcatttattacttcttgttgctatcgtctaggcaataattgctctttaatcattcctcagcggtcatattgtgacaattgccattctattttgcgatggtggcatctcatccctatttttagttttatcatccttcgcggtcaatgcttttattgtaaacaaaaaattagtttatatctgcctgtaattgaattcttatccgggattgcttttatcactttcatcagctatgaacctattcatgacttaatcattcttctctttctcactagcttaatcttcttaacttctactgatttttttagtcatgtaatctattcctattcactattgggactatttcctatttccttattatccattccacaaaattatttttacaatttgatttttgcctgtattctagcagtcagtttactattgttcactatttttactaagacactaggaattggtgatattgaatttttatttgtaatatgtctgatatggggatggtaccaaacactcataattatccaatggagttctttaatcatgctattcatctttttgtttacaagaaaaaagaaactaccatttatccccgcactagctttcactactattctgtgtcttcttatacaaggctgttaaaaaataaaagaccaggataccctagtcttttacaatatttaattagtatcatcttttactggtttgagttttactacaaataagttttgcccaaattgagcgaggttttcaatattttgtagtaataagagcaaccaagaaaaagctaagccaaattcaaataattcgaatgcagttaaagaaagataatcagttaacttaaaaacaatatattcgatactcattgcggctccaatcgtataagaaatcaccaaaaattgtttagtgacttcgggtagaacccacctaataactacaatcagaattagcataatataaacaagccacattgaaattctgtcatgtaaaacgtgaaattctggattattgggaaaaagaccaatagaagcaatacagatagctagcataattaacagccaccgcaatacttgaattttataaccatgataccgacgttgaatatttacaaacaagtaatcaactaaagcaatcattagtaatccagtaaaaatcaaagttatattaaattgcaaactggtggaattttttgccgttcctaaaaaactaaaattataacgccaccaatctcgtttagaattcgtcagcattgaaaaaagcattccaccaatgatcattattgttaataaattggtgataactcccgatgataatgttaaagccaagttaatcataatataatttattgccgcaataattacaaatacaaaagcagttgctgtataaatatcaaaccgtgcatccttaaacatctggccaaataaccaaaaaattgccgatagtgagaatgcaatgattagtccacatgcaatcgtaattgttggcaaactccgccaatgaaaatccttgctgggcccttttccgagaattttagtaataataaaagttatcaaaaacgataggattccactacatactcctaagattaatgcaccattagcaatggaataatcatcacctgttatcgggaccgtgttaatttttctggcgctaaaaaaagctaaaaatattgcagctaaaataattgaaggaatcacataccagaaaatgttaattttaggtagttgatcactcacatttattggacggatgttaatttgtttatgattaacactaagagagagctcttcgttcgtagagaagtctgtctttttaaatgctgagtcaggaatttctatctgatatttttttgccaagtaatcacctcattttaaactaaaaaggcaatggccccttcacaggttaaccattgccttttttataaattagttttgcttatcttcttcttttaacttagcctcaatatctttaattgagtaagcagctacactaacttcttttggcttgatgttccggtaagcactcataccagtacctgcaggaataatcttaccaataataacattttctttcaatccaaccaacggatcgttcttaccacgaatagcagcatcggttaatacacgtgtagtttcttggaatgaagcagcggacaagaaactgtttgtctctaaggcagccttagtaataccaagaataacaggacgagctgttgcaggaatatttccagcaactaaggtatccttgttagcgtcacggaattgactgatatccatcaattgacccggtagaaggtcggtatcacctggatccatgacacgaactttccgcatcatttgacgaatcataatttcaacgtgcttatctaacaagtcaataccctgcatccggtaaacaccttgaacttgcgataagaggtaagtttcagtagaaagaacatcacaaacctggattaattccttaggatcaatcgaaccttcatttagcggtgcccacggtgaatgaaatcaccttcagcaactttcatccgtgctgtaattggaagggtgtaagttcgggtatcagtctcacccttaatcgtaatatccttcgtccattcagcaggattttcttcgatagacacaacttcaccagtaacctctgtaattgttgcccgacctttaggattacgtgcttcaacaatttcttggatacgtggaagaccttgagtaatatcatcgttaccagcaaccccaccagtgtggaagttacgaagggttaactgagtacctggttcaccaattgattgagcggcaacagttccgacagcttcaccagcttctacacggtcaccagtagctgcatttcgtccataacaacgttcacatacaccatgttcagtgttacaagtaaatgctgaccgaatagttactttctttacgccggcatcaacaatcttttgagccatttcttcgtcgataaggacattcttaccaacaatcttttcaccagtcttaggatcaaagacagacttcatagtgtaacggcccatgattcgatcataaagtggttcaatcatttcgttaccgtttgtaatagcagtaacttcaagtccgcgatcagtaccacagtctttttcacgaacaaccacatcttgcgcaacatcaaccagacgacgagttaagtaacctgagttggcagtcttcaaggctgtatcagtcatacctttacgagcaccgtgtgatgaaataaacatttccaacactgaaagtccttcatagaagtttgacttaacaggtaattccataatcttaccgtttggtgatgccatcaatccacgcattccggctaactgagtaaagtttgaaatgttacccgcgcaccagagtcggacatcatgttaattgggttatggatatccatgtgttcaattaacttgttttgaacttcatccttagcatcgttccatgcaccgattactcgttcataacgttcatcgtctgtaattaaacctcgacggaattgcttagtaattaaagcaacttgcttttgtgccttatcaagaatttctggtttttctggtaaatcatgaatatcagacatagcagtcgttagaccagaaatagttgattcgtagtaacctaagtccttaatacgatccaagaattgagaagtcttcgtaactttgtaacgcttgtatacttcagcgatcaagtcagataagaagcccttcttaaatggtggaactaatggtgcattttcaaggtattcatgaatatcttgaccaggttcaaggaagaaacgatcatcaacaccattttgaatatttgcatctgttggttcgttaatgtaagcaaaatcttttggcataattcggttgaaaagaagcttaccaacagttgtcaccatgatcttgcctcgttgttcatcagtaaatggcttttcagggaatgcagatacttgaactccaacacgggtttgtaatgaaacatagtcattgcggtaagcaagttcagcttcatcagtatctttgaagatcattccttcaccttcacgacccttatcttcagtagtcatgtagtagttaccaataaccatatcctgtgatggtgaaacaataggttctccgtcacgaggactaagaatatggtgagcagcaagcattaacaaacgtgcctccgcttgagcttcatcagataatggaacgtgaatagccatctgatccccatcaaagtcagcgttatatgctgaacatactaatgggtgaagacgcattgacttaccagaaaccaagattggttcaaacgcttggatacctaaccggtgaagagtaggtgcccggtttaatagaactgggtgttccttaataacgtcttccaatacatcaaagacatcatcatcactgcgatcaatcttacgcttagcagctttaacgttagcggaaaggccacgttttaccaattcatgcataataaatggcttaaataattcaagtgccattggaactggtaatcccatttggttcaacttcaatgatggaccaacatcaataacggaacgaccagagtagtcaacacgcttaccaagtaagttttgacggaaacgtccttgcttacccttaagtaagtgagaaagtgacttcaatggacgattacctggtccagctactggacgtccacggcgaccattatcaattaatgcatcaacagcttcttgtagcatccgtttttcattttgaacaataattccaggtgcttgtaatttaagaagtcgctttaaccggttattacggttaataacccgccgatataaatcgttcaaatcggaggtagcaaaacgtcccccttcaagttgaaccattggccgcaagtcaggtggcataactggaattacatccataaccatccattcaggcttatttcctgacttaatgaaagcttcaagaatatcaagacgacgaatagcacgagtccgtttttgaccagtagcttctttcaattcttcttttaattcagcagcttccttttctaagtcaacatcggctaaaagtttttgaatagcagcagctcccatttcagctttgaaacggtcaccatattctgcttttttatcacgatattcagcttcagttaaaagttgtttcttttcaagtggagtatcacctgggtcaagaacaacatatgaagcaaagtaaataacttcttcaagtgaacgtgggctcatatctaatacaagtcccattcgacttggaattcctttaaagtaccaaatgtgagatacaggagcagctaattcaatgtgccccatccgttcacgacgaacttttgcactagtaacctcaacaccacaacggtcacaaacacgacctttgtaacggatacgcttgtactttccacacgcacattcgtaatccttggttgggccaaagattcgttcgtcaaacagaccttgcttttctggctttaatgtccggtagttaatagtctcgggctttttaacttcccatatgaccaactacggatcttatctggagatgccagaccgatctgcatactttcaaatttattgacatcaatcaaaggatgttcctccttctttcagtaaaccgtagcaacctaaatattaattttgattagttttgtcatcggtagttgttgaagttgcttcagacttgttttcttcttcgttcttcttatcgtctgttttatgttcttctgcatatttagctaatgcatcaacatttacaacttcatcatcatcttcgtccatgttctttaactgaatttccttgttgttaccatcaagaaccttcatatcaagacctaatgcttgtaattccttaacaagaacacggaatgattctggaacacctggcttaggaattggttgaccattgatgattgcatcataagtccgaacacgaccaacagtatcatctgacttgtaagtaaggatttcttgaagagtgtaagcagcaccataagcttcaagagcccaaacttccatttcaccgaaacgctgtccaccaaattgtgccttaccacctaatggctgttgagtaacaagtgagtaaggaccagttgaacgagcgtgaatcttatcatcagccatgtgagctaacttaaggtagtgcattgaaccaacagcaatccgattttcaaatggttcaccggtacgaccgtcataaagaattgtcttaccgtcttctgggaatccagattcacgaacagcatcccaaacatctttatcagatgcaccatcgaatactggagtagccatatgaattccaagacgacgagcagccattcctaggtgcaattcaagaagctgaccaatgttcatacgacttggcacacccattggactaagcataatatcaatcggagttccatctggcatgtatggcatatcttcttctggtacaacgatagaaacagtacccttgttaccatgacgtccagacatcttatccccaacctggatcttccgcttttgtgcaatgtaaacacgaaccattgtatttacacctggtgataattcatccccattttcacgagtaaagactttaacatcttggatgattccgccaccaccgtgaggaacacgtaatgaagtatcacgaacttcacgtgacttttcaccaaagatagcgtgaagaagacgttcttcggcagataattcagtcattccctttggagtaaccttacctactaaaatatctccatcatgaacttcggcaccgacacgaacaattccgttttcatcaagatctttcaaagcatcgtcaccaacgtttggaatttcccgcgtcatttcttcaggtccaagcttggtttcacgtgcttcagattcgtatgattcgatgtgaatagaagtataaacatcgtctttaactaatcgttcattaatggcgatggcatcttcgaagttatatccttgccaagtcatgaaggcaattaatgggttttgtccaagagctaattcaccttgttccattgatggaccatcagctaacacgtcatcagcatcaacatgttcgccaaccttaacaattgggcgttggttgtagttcttaccaccgtttgaacgacggaacttcattaacttgtaagtatcaagtgttccatcttcctcacgaacccgtacttcacgagcatctacatattcaaccgttcctggcttcttagcaatcatcgcaaccccagagtcatgggcagccttgtagtcaataccagtacttaccaatggagcatgaggattgatcaaaggaacagcctgtcgttgcatgttagcacccatcaatgcacggttggagtcatcgttttcaaggaatgggatacatgcagaggcaacagaaacaacttgcttaggagaaacatccatgtagtcaatgttttcaacactggtttcgatgtagtcatctttatcacgagccattacttgatcgtcaacaaatgaaccatcatcatttaatggcgtgttagcctgagcaatgatgaagttatcttcttcgtcagcagttaagtaatcaatcttatcagttaccttgtgatccttccaggaaacacgacggtatggagtttcgatgaatccatatttatttacccgtgcgtaagatgaaagactgttaataagaccaatgttaggaccttctggtgtttcaatagggcacatccggccatagtgagtatagtgaacgtcccgcacttcatatccagcccggtcacgagttaaaccaccaggaccaagagctgaaagacgacgcttatgagttaattcacctaatgggttagtttggtccatgaactgggaaagttgggatgaaccaaagaattctttaatagaagcaaccactggacgaatattgattaattgctgtggagtaacagtgtcaggatcttgaattgacatccgttcacgaacaactcgttccatccgtgcaagaccaatccggaattggttttgaagtaattcaccaactgaacgaatacgacggttacctaagtggtcgatatcgtctgtactaccaataccttcttgtaagttaaagaagtagtttaaggaagcaagaatatcagctggttcaatgtgcttgtattctaatgggatatgaccgttaccaataataggtacaactcgatcaggatcagtcttagaatatactaaaatcttttgtaacttaactggttcagttacaaccgcttcatctgatggagtgtaagtaatagtcttaaagtcatcacggtctaagtaaggttcaagcttattaagcaattccttagttaccgtatcacctttttgtgctaatacttcaccagtatcaggatcagctaaagtttcagctaaagtttgtccaagtaaacggtacttaagcattaacttcttatttgtcttataacgaccaactggtgccatatcataacgttttggatcaaagaaacgagctgttaataagctccgtgctgaatcagcagtctttggttcaccaggacgaagccgttcataaatgtcctttaaggcttcttcaacccgagaatcttcagcgttcttgtgaacatctttatccaaggttaatgataatgtctcactatcgccaccgaacatgtcaataatttcatcgtcagagccaaagcccaatgcacgaatcaattcagtcattggtaacttacgggtccggtcgattcgaacatatgaaacatttttagcatcagtttcgtattctaaccatgcgccacggtttggaataaaggtagcaccgtagtttggccgaccatttttatcattttcttcactatagtagacacctggtgaacgaactaattgtgaaacaataactcgttcggcaccattaataatgaatgtaccttggtcagtcattaatgggaagtcaccaaagaatacatcttgagacttaatctcaccagtttcatggttagttaaccgtaaagtaacatgaagtggtgctgagtaattagcatcgtgttcacgagcttcgtcaacagtatacttaggttctaaaagttgatagtcaacgaattccaaagaaagttttccttgaaaatcatcaattggcataatatcatcaaacatttcccgcaaacctttttccatgaaccaattgtaagaatcggtttggatttcaataaggtttggcaattcgagaacttctttaattcgcgagtagctacgacgggtacggtgtttaccgtatttaactaaatgtccagccaaactgttcacctctctaatttattccgcgagctcatttaaatgttacaatttgattacaatttgcctaaaatacgacttttgggcaaaaaaaatccaaaaacagttcaacgactgtctttggcttttatgcagaatctgatggacaatagatcaccaggttcaaatgaactcacaattacatactatttaagtatacaagttctattaaatttcgtcaacaattatttttatattttttaattttttccgccccaatttgataaaccgttaataatgcagtctaggattaattggtcacgttgttctggtgtaattgaatggccaccaattaattgcgaagtgccaaaaattggagttagtcctgcaataaataattcagcagcttctttaggaagaatatcaggacgtaaccctacatctggttgacggaaaaatgctgcaattggttctagataatccattgtaaagatcatattaagcttttgctgtgcactcttcgataataggcgcattgcctgattgtattggtcataaatacttaatggatgatgtttttttaatgccttggtgatttgccataattgttcattcggtgacaaatcatgtttacgcattactttattaatatcttggcgaacttttccacataaatttgtcattacatccagatataaaacctctttatcgctgaagtggtggtataaagccggttgcgtaattccaatctgtttggcaatatcccgtgttgaagtttcaccaaatcccttttgtaaaaataactttgtagcggtttttaagattgcttgtcttgtcttttctaattgttctgctcgcttcatttattgttcatcccctatttttaatcattaattatctgataaacacattataaggctataacttatcttttgacaaccgttttagaaaaataatcatcaaatgtgataaatgaatgcaatttggtagctttttcttctattatcattagatatcattagagaacaaaagttacaattataacatttttataatacataaaactcaaatattcggtttgtgtatttcaaatttaatgaaaccagaatacaaaacggtaaattactctgcactttcagaataatttaccgttctttttatctattcaattttaattcaacagctttatcttcatctggcttttttactttaaaagtaattttaccgtgatgcgcacctactgttacgtcatctccaacattgatttcaccactaagtagtccagtactcaaatcatcttcaacatgatcttgtaaggcacgacgaagcggacgagctccataagcaggattgtaaccaagctttgcaattacatcaattgcagcaggcgtaactttcaagttaatgccttgctcacttacccgtttatttaaatcattaaccatgagtttaacaatttgatgaagctctttcttttgtaatgaatggaagataatcgtttcatcaatccgattaaggaattctgggcggaagtataacctcatttgttgcttaatcgccgctgccatcgcattatagtcttgtgacatatcttttgccccaaaaccaacttctttttcatcctgaagctgagttgctccaaggttagaagtcataataataatggtatttctaaaatcaacgcgccgaccttttgcatcagttaagtaaccatcatctaaaacttgaagtaataaattaaatacatccggatgtgccttttcagcttcatctaataagacaactgaatatggatgttgccgtactttttcagttagttggccaccctcgtcataaccgacatatcctggagcggcaccaatcaagcgactagtactatatttttccatatattcggacatatcaatccggatcatattatcttccgagccaaacattgcagcagctaatgccttggcaagctctgtttttcctaccccggtcggtcctaaaaacataaaagaaccaatcggccgactaggatccttaagaccgcttcgtgcacgccgaattgccttagcgactacggtaactgcttcatcttgaccaattactcgttgatgcagaaccttttccaagttaaccaatcgttcactttcactcttcttcaattgagttaaaggaactcctgtccattcagcaacaacttgtgcaatgttttcaccagttactttcaatttgtagttatgagaatctttttgttgagtgcgttgttttttacggtcaatcttatcttttagtgctaactcctgttgacgaagagtagctgcacgatcaaagtcttgattatcaattgcttcttctttttgggttcgcaaatcttctaactgactttctagtgaaggctgatgatttttcttatcttcagcatcaattcgaaccatagctgccgattcatcaataagatcaattgctttatctggcaagaatcgatccgaaatataacgatctgacaatttaactgcttcttctagcgcttcatcagtaattttagcatgatggtgctcctcatactttggtcgtagtcctcgcaggatttgtagagtttggtcagtagtcggctcatcaacttgaacagtggcaaagcgtcgttcaagtgctgcatccgattctatatatttctgatattcatcaagcgtagtagcaccaattgtttgcaactcgcctcgcgctaaggccggtttcaaaatattggaggcatcaattgcaccttcagcaccaccagcaccaattaaggtatggagttcatcaataaaaagaatcacatgcccgtcgttttgaatctcatcaattacttttttaagacgatcttcaaattctcctcgatacttggtacctgcaactaatgatcccatatcaagcatcatcaaacgtttattagccaattcagctggaaccttaccatcaaccatccgctgagcaagtccttcagcaattgccgtcttccctactcccggttctccaatcaaaactgggttattcttggtacgacgactaagaatctgttccacacgtttaacttccttatttcgaccaattacaggatcaagctgaccattccgagcaagttctgtcatatcacgagctagtttatctaatgttggtgtaccagtttgctgaatccgtcgacgagatgattgacgattaggattgcgttgctgactatcagcaatccctaaccgccgtaaaattacttttctcatctgtcgtggcacaacatctagactatataaaatccgtgaagatagaacactttcatcagcgattaaggctaataataagtgttcagtgccaatcttcaatgcatgcatttgttgggcttctttacctgctaacgataatacttgctttgcttttggtgagtatgggagataatctgaagctcccagattttccatcgttccatagccaattaagcgttcaatttcttcacgaatatcatcgttcgtaatagaaaattgttcaaatattttgttagcaatcccatctttatccattgagagggcaagcagaaggtgttcagtccctactgcttggtgtttaaagtattttgcttgttcttgtgcaattgctagaacatgctttgcacttggcgtgaacatattatccatgtacaatctcccttttaactttcatagcgaagtcgattcaagaatgatactaatatacgggcgcgaagttgatcttcaatcttactatcattaactgctagtgcttgtttagataatgcaactagcattaagtctccttcacgtctcgtaatcacgtcttcttcatataacgttcgaacaatatcaaaagcatcacgttcacgaaccgagtcgccaattgcttgaataagtgagtttagcacatttacgtcatcaagtaaattaactcgctcgattcgaatatatccgccgcctccacgcttactctttactaaataaccattttgaatggtaaacctcgttttaataacataattaatttgtgacggtaccacatcaaactggttggcaatctcagaacgacgaatttcgacctgagctgagtcaccaagtatttcttttaagtatgcttcgataatatctgaaatacttttattctccattatatcacctcggctcttttgactaatcttgaccattattttaacacacttttagagtcagcgcctacttgtatgatcattcagttacacatttaagaaaataataaagactagcgaagcattcaagcgcaacactagtcttttagagaattaaatatgaactacttttttaattagtcgttatcgttgtgaacaaaatcaacaacattccgaccaacaaccttgttatccttaagttcttggatcatatcattaatttcgcttaacttacgagtcttaacaattgggtgaaccttaccttctgcaccaaattggaaacattcagctaagtcttgacgtgtaccaactaatgaaccagcaacaatgataccatcaagaacagtcttagcaatgttaagcttcatgtcaccttgtggaagcgcaacggcaacaagcttaccatctgggcgaagtgaatcaactgcttgatcgaatgcagagggagaaacagctgttactacagcagcgtgaacaccgccaaccttttcttgaatttgcttatcaacatcaccgtcatgacggttaattaaaatttcagcaccattcttcttagcggcttcaagcttatcaggattaccatcaacagcgataacatgagcaccaaatacgttgtgagcaaattgaatacccaagttacctaaaccaccagcaccaacgattgatacccattgacctggcttgatgtcagcaacctttaatgccttgtacatcgtaacaccagcacaagttaatgaagtagcttcaacaggatcaagaccttctggaaccttaacagcgtagtcagctggtacgatacattgttcagccattgcaccgtcagcagtgtaacccgcattaagaacattccgacaaagagtttcacgacctgttaaacaatattcacagtgtccacagcccttgaagaaccatgcaattgatacacgatcgccaacttttaatgaagtaaccccaggggcaaccttagatacacgaccaaccccttcatgaccgataatacgacctggcttcttaccaaagtctccagcagcaacgtgtaaatcagtgtgacaaaggccacaatattccatgtcaactaaagcttcaccgggctttaaatcccgaagttgaacatctttaacagtaacaaaaccgtctactggatcgttaataacagcagctttcataaggtaagatctcctttattaataaacaaattactttttacaatgcttatagtaccacaactcctagacaaatttaaagtgaaaatttgcacatttaacgaaattaataattttattttttatttaaaacactgatataacaatgataacgcccggaaaatcaattcttttaatattgtatagtaaatcacttactaattatcactaaaactttactgttacaattttagacgctctctattaatatggatgttacaatttaatcaattagacaaaggagtggtagctaagtgaaaatgtagagcggcaatatattcgttacaataatcgttatggaacggcaattgctgctgatatctacacccctaagaatctagaagaagacaaattgttatcagccatcgtaatcggggcaccttatggaagcacaaaagaacaggcagcagcaatttatgcaaatacgtttgctcaattaggttttgttacccttgcatttgatcaagtatacatgggtgaatcagctggcgaacctcgtcatgttgcttctccagacttatatgcggaatcttttagtgccgcagttgattatccaggtacaaaagcaaagcatgtcaatcgcggacaaataagtgttatcggtatcagtggaggggcaggctttgctcttagcgctgcggctgttgatacacgaattaaatctgttgtaacaatttcaatgtatgatatgacagatattcgtgagatggctaatcttgctcctgaacaattattccagcttaaagatcaattatcaaagcaacgttgggacgattttgaaaatgggcagcctgactatcatccttccttcccagaagaaccatatgatagtattgacgatttaccaaatcatgatgagttaacaaatgagtggcttcgtttttacgctcttaaacgtggcttccatccaaatacacgtggaactgcaacaaccacttctaatttagcaatgcttgaattttctgcgttagactatattaaagaaatttcaccacgaccaatcctatttatttatggagacaatgctcactcccgttcttattccgagagagcttattaccttgctaaccaaccaaagcaaagattgatcgtaaaaaactgcgaacatattgatttttatgataatatggaaaaaattccagtagatcaaattgcaaagtttataaaagacagtttcaacgcataatcaaacgacaaaatgccaatcagtgcctcaattatggaagcctggttggcattttccttttaaatattttcggaaattaataaaaaactgctatctcttctactatagaagtgataacagttttttaacttatcggaattacaagatttgaacttgcgacctctgcgtcccgaacgcagcgctctaccaagctgagctaaattccgaaaaaataagcgtaacagttaaactgtcacgcttactataattagtgcacccagaaggagtcgaaccttcaaccttctgattcgtagtcagacactctatccaattgcgctatgggtgcatataagcggaagacgggattcgaacccgcgacccccaccatggcaaggtgatgttctaccactgaactacttccgcatgtctctgataagttattccctatcaacgattattaatattacacgaaaatctcatcaatgtcaacaagaattttcaaaaaatattaaatgcggatgaagggacttgaacccttacatcaaaatgatacaagatcctaaatcttgcgcgtctgccaattccgccacatccgcaaactaatggaggatacagggctcgaacctgtgaccccctgcttgtaaggcagatgctctcccaactgagctaatcctccataaataggcttgctatataaatcagcctatttaatatatcatctatatgattttttgtcaaatcctatttaagatttaattcaattaatttttcatcaatcatggctaagaccttcttagcagcagccggatcttcaacaaaatcatatttatcaccatcaataaccatcttaggactttcattataatcctcataccattgaacataacgttcgtttaagtttttataatatgaatataatgaagaatcattagcaatttgttcaaatgaacgtccccgtttcttaatccgttcaagcattgtctcaaacgaaaccctaattgtaattaaaaggttgggggctttttggtgtggttgctctggtaattcttccatcatgttacttaataatgaagaataaatatttgactccgtttccgtagctcgacccatatctgcgtttaacttgaataataaggcatcttcaaaaattgaacggtccaaaacatttaaatcatttgagtatgaatctttaatctcatcaagccgcttgtttaaaaagtaaatctgtaataagaaaccatattttttaggatctttataaaaaagcggcaaaattttattgtcatcaacagattcatagaaggcctggctattaagatggtctgccaacagctttgtcaaactggtctttcctgcaccgattgtcccagctatagcaatcattagttatttccccctgtttcaaattcaaaaagtaacgaaaacaattctaacatttaaaataaaaaggagcgagtattttctcgttccctttttattttattaatcatcttccggttcgtacgattcaccctttgttcgccttgataaatcaaccttatcaagcggaatcaagtgcgtcttgtaacgaatcttgtagtagaagaaaagaattaagaataatggaattcccatgtaagtaattaaaatgttttgccagtccatttttacaaaagcatcaatgttttgaccacaaataacgacaatacatagagtaagcgcgaatactgggccaaatgggaaccctgttgcatgatacttcaattcagacagtgtatggccttgcttaagaaatgccttcctaaagcggtagtgggaaattgcaattcctaaccatgcaataaatccacacaatccagatgcaccaattaagtagttataagcttcgggaccaatgaattgggttgcataggctgctaatgaaacaaccatcgttcccagcaaagcataaatcggaataccatgccggtttacataaccaaaaatccgccatgcatatccttcacgcgcttgtgaataaagcatccgggttgaagcatataaaccagagttagcagcagaaatgacggcagttaagataaccgcattcattgcactagccgcaaatgctaatcctgcccgcttaaacacaatcgtaaatggactcattgtaatatttgaaacgtcttgattcaataagttcttatctgtgtaaggaaggatgcaggcaataacaaaaatagcaaaaatataaaaaagtaaaattcgccagaaagttgaatggattgcctttgagacagacttttctggtgtagcagcttcaccagcagtaattccaactaattctgttccttggaatgagaacccagcaaccaagaaaacactaataattgctggcacacctccaacaaacggtgcctgcttatagtggaagttgcttaatccaactggcttaccacccataattccaaaaataattgcaacaccgacaattaaaaatacgataactgtgacaactttgattaaagcaagccaaaattcagtttcaccataagatcgtactgataaataattgattaagaaaattaatgccatcactgttacactaaaaatccagcctggaacattaggaagccaataattcattacaattcccgcagttgtaacatctacggggattgtaatcgcccagttaaaccaataattccaaccaagagcaaaacctagtgctggatcaacaaattttgttgaataagctgaaaatgacccagttaatggcatatatgttgccatttcccctagactcgtcattaggaaataaaccataattcccataattccatatgcaactaacgctccgccaggtcccgcagttgaaatagcggatccactggcaataaaaagtcccgtaccgattgttccaccaagagcaatcatggacaagtgacgtgtctgtaatgtccgttccatatgacccgtcgacttagattcatctgccataaatatatttcctccaaatttgtgtgccttaacgtcaacattttcgaagaggataaattaaaagggtcttctgatcggtaaccccaccagaagacccaacttaatacctataattaatcgttgaatcaatttaggaagcgccccgcaattattgcgacagtctatagcctattgtgactatagcccaacatctaccagaaataagctaagtagtgtttcggcatattttccttttactaatactccggtgcttattcacctaatactagttactgataaaatatgcaacctcttcatcgaatgaaattataccccactcaaataaaaatgcaagtccgattatttaataatgcattgccataagtcatccttgtcataagtaaaaccacatttaacaagtactcgctgagaacgataattgctttgtttgcactccgcatgaatcgtaattttagatggcaaaatagaaataaatttttgaagtgcagttgtcattatgcctttattccattggttttgctgcaaaagataacctaattcataatgatgagcaattctttttccttcatccccataccaagcacttaatacaatcatccccactacatcttcatttagtttcactaccattacatgattctggcgaacaaacatcttaatagcttgcacacgtttttctctttgaagtggtaaaagcagtcccactgcttgtgttaagttttcattatccaacaatttaactattgctcctaaattgttattagtttttgctgattcaattataatttcactcatttttctcctatttcccgggaaataaaaaagagaagcaaccaaaaagattgccctccatcaatttcgattattaaatttcaatactacggaagaacggaatccgttgcaatcgtggtgcccaagcgacatagagccattcagctacttgtaaccatgcataagctaataacattgcaccaatagtatcaaaaggccagtgagcataaagatatacccgcgataccgccaaaaagaagactgcaaatattaataaaatttgcaaaattgtgcggacagatgctttttgaataagcggaattacaattaagaataaaattgctactaccaagaagaatcctaaagtgtgaccactagggaaactatagccatcatctgctgccaagtgttgtgcaggacggacccgcttaacgatgtgtttaataattgttccaagcacatcaccaccaaaaatcgttcctaatgaccataaagccgggatgcgatagcccttcaaccataaaacacctgcaataataaatacccatactaaatctaagaccggtttaactaaaaatgaaagtaagctcatcaaagcatgaaaccaaccaattccttccaggcgctgactagtaaataacgactgcagaacagcatcaatcattgttagcactgacgaattaaacataattaatagcatcaatgcgataaagaaaccaccgcttaaggcaaagcgccaccaccgatgatcatcacgttcaataaacataatcaaggattctcctaacttaaattaattaatcaaaaataagtataccacagtgtcaaaaattccatcgtgactttttgattaaatatttatgaagatagttcaaaacacgatttaaaagctctcccaaaccaaagccaagcgtaattgcaccaacaatgacaactacctggtagaaataaacattaacaagatggtaattaccaatagcaaaattacgaaccattttataagcctgtcctccaggcacaaatggaactagcgcgggcacattaaaaacaataattggcattcgttttcgacgagctgctgcctggcttaataccgaaattaagattgcagcaactaaattactaaacgcaaggccaatgccactgcaataatacattatccagtagactacccatacgcctccaccaatcatccccgcagtatgataggcacgtttaggaatatttaagaggataccaaaacaaactgtcgaaacatagcataagaaaaattgtaataataggttaccccaattcatctcctaccctcctaattaaagtgcagaacaattacaattgcactaccaatcgaaacggcagttagaatcgcctcaatccctcttgtaggtccactaattaagtttccggaaactaaatcccgtgccgcattagttaagggcaccccaggaaccagaggcataaccgcaccaataataatatcattaatattattagcaaggtgcattttaacaaagatcaccgccaaaatacctataattaaggaagaacaaaactctcctaaatattgaatcttaaactttcgtaaaaggtatgaaaatgctccgtaacctacgccacctgcaagaaagccagcccaagaatcagaaacattacctgtaaagacaatcattaatgcaccacttaaaatcgcagcagcaaatgattcataccagttttgccatcttgacatcttttggtgatcaatcctttttaatttagcaaatgcttgtggaacatcaattttgcgccgtgctagttcacgagaaacttcattgacatccgcaattttacttaaattgtttttgcgatgacgaatagtaattacttgggcatcaggttcattaatcgtcccaactacaattccagttacggttgtaaaagcctgaaagccatgaagtcctgcactttttgccattcgggataaggtgtcgttaactcgttccatatttgatccattttcaattaaaagtctcccagctagcaaacaagtctttagtgctagtgcttgtcgtcgtttcgttaacatcttttcgccttctctgttcaaagatatttattattatcctctgtttagataaggagctcaatacaaaaaaacggccggaaaaatccagtcgttttttgtatttagtctttaactacatttgcagcttgaaggccacgttcgccttcttcaacttcaaacgtaacatgttgtccttcgctcaatgacttaaagccatccccttgaatagcagaaaaatgaacaaacacgtcatcgccgctttcacgagtaatgaagccataccccttatcgtcattaaaccatttaacagttccttgttccatgttggaaatcctcctgtgcattaagcactaatataatttgtaattcgtctcaggtgaagagatccatttgcaatgaaacaatcgaaccaaccgcacttaaaaaaactacaaaaaccattgtatcacataagcaatcatttacataattaacctttattttcttgagctgtgtccggttcaataaaaatattatgtgaggccttatatgaaacattaatttcttggtcgttatcctctttttgaatcacaattggtccttcaaaaggctcatggcgaattacagttacttgttcctgaggtcgtaatcctaactcttctaagtaagtgagaagttcatgattatctaagaatcgttctagttcaactttttccccatcatcagcatctgctaataaacgatgtgttacatctgggaacttgccattagctgatggaattactccaccatgcggacaatgatcagggtgttgaagaaaagcatctaaggccgttgctagtcgatcacttgtctgatgttcaagaatttccgcttctgaatggacgtcggcaaaattgtagtgaagcttatccactaaaaatgtttcccataaacgatgctttcgaactaattctgcagcatacttttgtcccttttcagttaaagaaataccagcatatggttcatgaacaactagcccttcgtcagccaacttagaaatcatctcggttactgatccagcggcaattcctagtccaagggaaatctctttattagaaacttttttatgactaccacctaattcaaaaataatttttagatagtcttccttcattggagtcaaattgtttcacctctgggtattaaaatttggcctacgatcggtcattatgtgtttttatatattaacattgaacccaaattgattatagcatattattaaaagtgtagtttggaaagcctaacttttttgttataagctttttataaacccgcaatcgatctttacggaggagtaggtaaatcatggacgaaaaagtaacagggaaacgctttttagcagttaccctcctaaatgtattaattacaattgttgaaatcttcggaggtattctttcaggaagtttagccttactatcagatgcttttcataatttaggggattcgctttccattgtactaggctactttgcccagcatattggcgggcaaccagagaatcagcaacgaacttatggctaccgtcgagctgaaatcctctcagcattaactaatagtatttttttaattgttatctctgtctttttaattattgaagctattaagcggttagagcatccccagcatattaacgggggcattatgttaactgtagccgtgattggtctgcttgccaactttatttctgcagccctcttacatgccggaagcgaagacagcttaaatgtcaaagcaacttatctccacattctaagtgatgcactttcatcagttgccgttatcattggaggaatcattcttacctttgttaatgttccatggcttgatcccgccttgacaattggggttgccctctatattgcttatgaggcttggccaattattaatcaaaccattaaaattctcatgcagtcctccccagatcttgattataattccatcgaaaatgatttaaagcaaatcgacggagttgcggcagttcatcacgtccatgcatggatgatggatgaacaccgaatcattttctctgcccatcttaattgtgatgacttgccactaagccaggttgagcgaatctatagtcaagtagaaaaaatcttgcatgaaaaatatgggatctgtcacgttactattcaagcagaatatcaccgtgggaaagatgaaaaattattcaacactcctgttgatgaaaagaacgttattaataacgatttcaaagaggactaaaattaaaaggaagcaaaaagttgagcgaaaactcagcctcttgcttcctatttttttacatcgattaaaataattttccgactccatagtgaatcgtaatcgtaatcaaaccaataataatatttcgaataactgcaatttttacaagcccgttcccgagtttagaactgatataaccggttagagcgctcgtaaaggcaactgccaaaatcacggcataccacttatatgcttcgggagcaaaagtcatcgccatcaacggaattaatcctccggcagctgctgaaaaaagagaagaaaatgcagcatcccaagggttaagatagtgaccaagctcaacatcatacttaatccgaacaactgtctcgaggggctttttattaaggagatccttagcaattttgattgatgtttcaggagtaactcctttatttacataatagtcttttactgccgcaagttccccttcataatcgtcctttaagagttgctcttctttagcaacggccgctttttctgtatccttttgagtagatacagaggcatattcgccagaagccattgaaaatgcacaggcaagcaaatcagataagccagcaatgaagatagtaaaacggtcacttgtcgctgctgccaccgataccaaaacaccgacaacagtcaaaatcccatcatttgaacctagtacccctgctcgtaacgtattcagtttttcttccattgtttgcttctgatgctttttcaccttaatactcatttaatctcatctccctaccgcgcaaataattgtccaatcaggtacgtaacccccattgttaataatccagcagctgcattcctgatcatcgatttaatccggttagattttcctaaaaccgccgcaaaataaccagtaattaacaaggcaattaaaactgcaattgcggttgctaagattcgaacatttacgggagaaacggtaaccgccaccattggtaaaattgaaccagttggaaaggatataaaggaagcaatcgccgcagcatatggacttgtaaactcattgggattaaagccatagcgctcttgaacagctgtccctaaagcatctttttccattaattctttcgtcgcttgtttagctaattgcgaatcaatgtcttgagcttcatatttcttttgaacatagtcaaattcatgctggtattgattctgaagccgctgcttttcactaatcaaagccattttttgtgagtccttttgggtcgaaactgagacgtactcccccatacacattgagatcataccggcaagtgttccggacaaacccgcgattaagatggaacgggcattactcgttgccgctgccaccccgataacaattccggcaattgaaataatcccatcattagcccccatcacacttgcacgcagaacgtttaccttttgtgctagtgacatctttttcttggacacatttatcccttccctctttcagtttagaatcattataacatagagataagtaaaaacaaccaaataatcttcaaatgatattctatcttagaatcattaaaaaatatactttcatgtaaaaagcgatagtcctaatcagaactatcgcaataatcttaaaaattaaattatttattcataagcctgaacagtgtttgtccgaataacaaatactgacgttccagcatgacgagccatgtatgatgcctgagaaccaaccgccttacgattacccttcttaccaattgaaccaacaactaataaatctggctgaaaagcggggataacatgattacaaatccgctcagctggccgctccccacgatcaacaatcgccgtaatcttttctggatcaacgccgtaatcaattgctgcttggacatattcatttacccgttgacgtaattcgtcttcactgctatgaacataatccttatctaagatttgatatacatttacccggtcagtttctagaattgatacaattcctagctctgaaccatcacgtttcgccttatcaaccgcgtatgagaaagcggcacgggcatctggtgcatcgtcaacaccaacgaggatcttcttgaacttctttggctttatttcgaacattagtattctcctccctatgttctacactttaacggtgaagcattactcgctcctcttcgttaaatcatattcttcactccttatgttactacttatctcgattttgtaaataattattttggccttcctaaaataaaagtgatttattaaagaattttataattattttttcaaattcacttctacacaattctcattttgacgacttatagaacaatcgatataataaaagttacttacttcttgataatatcaacgaaatggggttaattatttcatgtcaatgattgaatttcataatgtacaaaaatattatggcaagtttcatgcattaaaagatattaatttaacaatcgatgatggtgaaacagttgttttaattgggccatctggctcgggaaaaagtagtttaatccggaccgttaatggtttagatcctattagagacggtcaattaatcgttaatgggtttgaccttgccgataagaaaaccaatgtaaatttaattcgaaaagatgtcggaatggtctttcaacactttaacttatacaacaataagagtgttatcgaaaacataatgctcgcaccacgaattgtattaaagcgtccggaagaagaaaaccgtgagttagcaatgaaactgcttgataaagttggccttgcaaataaagctgaaagtatgcctgctcagctatctggagggcaaaaacaacgaattgcgattgcccgcagtctggctatgaagcctaaatgcctcctattcgatgaaccaacaagtgctctcgatcctgaaatgattgatgatgttttagacgttatgaaagatatcgctaaaaactccaacatgacaatgttagtagtgacccacgaaatgggctttgcacgggcagttgctgaccgggttatttttatggcagatggtcggatcttagaagacgattcaaccgaaaaattctttggcgaccagccttctacagagcgtgctcgcgaatttatgagtaagatcagtggtcactaaggaggaattataatgaaaaagtattggcgattgattagtcttagcgccctcctctttgttgctctccttactctttctgcctgcggtacctcaattgcaaaaaaagatgttctgaccgaagatatgcgtagtcaacgaattacctggggagttaaagcagatactcgtctctttgggctggaaaatatccggacaggaaagctagaaggatttgaaattgatcttgcaacagctattacaaaaaagatcctcggcccacagggaaaaccaatttttgttcctgtaaccagcggaacccgggtgcccctattaaaaaatggtaatattgatgcgattatggcaaccatgacgatcactcctgagcgagaaaagcaagttgactttacccattcttactttgatgctggtcaatctctcctagttaaaaagggaagtccaatcaaaaacatcagcgatttaaatcgacgaggtgctgtaattcttggggtttctggatcaaattcagttaaaaacgttgcgaagtttgctcctgaagcacgtgtccttcaattatctgactatgctcaagcgatgacggcccttaaatctaaacagggggatgcccttaccactgataatgggattctctatgggatgcagctgaaaacccaggctatgaagttgtcggcggtaactttactaaagaaccttatggaatcgccgttaacaaaaatcaaacacgttttcgcaataaattaaactgggcgttaagagaagttgaaaaggatggaacctacaaccgtcttcttcttaaatggtttggcaatgttaaaggatttaattatcaggagatgaagcgctaatgttaaatttaattataaatgagtggcatccccttttaaccggcctctggaatactattctatgtagccttattgcactaatcgggagccttattattggaaccttttttgcccttctcgagatttcgcagcatcgggttttaaaaatcatcggtcatgtctatgtggaggtctttcgtaatatcccactattggtaattacaatggcttttttcctgattatcccaatgtatgtagtgaaaattaatggatttactgcgggaacaattggcttaactctttatacgtctgcatttattgctgaaactgtgcgtgctggaattaattcaattgatcctggtcaaatggaaggagcccttgccaatggacttacttatggacaagcgatgcgctacattgttttaccacaagcatttcgcgttgttattccaccacttggcaatcaatttatcaatttggttaaaaactcatcggtccttgcctttgtcgctggctttgatcttatgtaccaaggaaatctaattgcaaacgataccttagcaactatgcccacgtatttcattgtcgggatcatgtacctcatcatcacgcttccgttgagttattatatgcgacaccttgaaaagaaattagcctaggagggatgatcaatgcaaaactttattgacgcttattcatggattaatatccgtttcctcctagaaggactttggattacgattgaagtttccgtaatttcaattataatcagttttattttgggaacttttctcggaattattcgttacgctaacatcaaatacttatcagcaattgtaggattcattatcgatattatccgtaatcttcctctcctgctaataattttcttcacctactttggcctccccaatatcggaattaaaccagaaattattcctgccgcaattatggcgctttcaattttcgaatcggcaatggttgctgaaatcgttcgctcagggataaattcgattgattacggtcaaacggaaggggcattagctaatggattaactaagtggcaagcattacgaattattgtcttaccacaagcaattaagaatatgatgccggctctcgttagtcagttcatttcattagttaaggatacatcactagcaacaatcattgtcttgccagagttaatgtaccacgcccagatcatctatggtcaaaacacaaattatattattccgatgttcgttgcgttagcagtcctctactttattgtctgctactcattatcattggttgcacgttatttgcataaacacattgcataagtataaacagaggctgagaaaaaactgttgtttttctcagcctcgttttatatgaatattgttacgatatcgcggaaattaaccacaaggcggttaatttccactcacttatttaatactgaatcataaagtcaaaccgttgatgctctccggtcaagcgattaacatgccgttccatcacttgacgtcgttgtccaaacatcatccaaacggcgattccaataaatactactaattctattcccgtcccaatccaattttgaactgttactttgccagtcatcaacgttgaatcagaagcaataaatgccgtccaatctaataggaagtgcattaccattgctagccataattgaccagtataaacataaacggttgcaaaaaatagtccaatcccagctgcgctaactgcttgtaaaacagtcattgaccattcttgagggccatagttggtaagatgaacaattccgaataaaattgaactcgttgccaatgccaacggaaggcgttgcttaacattgcgccaagcatagaataagatgccaagaatagcaaaacggaataaggtctcttccattaccgcagcctcaaacgccgaaagggtaaaatcccaattagcacggtggagccttggcatttctcccgtatttaaggccataaagataatatcaacaacaactaatccagcaaatatccccaattaaaatcaccgctccagtgtggttttaatcctggccatgataaatgccacgtccgcataacagttgtcgtaagaataaagaaagcaactgcgccaactgcaccagtcgataatgctaataataagaagtgattatcaaccaagtctgttggtaaggcaatcaatggcgtaaaaaccacctgagctaaccaggcaataaagattagccgttcgatgctccaatgcatgaactcaccaattacgcttgcaaatggtgcaaacataataaagtaataaaaaatcatcattgtcacaacgccccgggatggtaaatgtaatagaacaataatttctcgaaccattacatcccaagcaaacactaaaattatcggctgggcaattacctgcagccatgcattcaactttttaactaacaaggatacattaggtaagagttcaaagactaaaccaattcctaaaataataaccatgatcaataatgctaatgcaacagtctgacgattaaattcgtaattacgaatcatcatcattgccaaaatgaccagggtcgccccaatttgaacccggtaccagatcctaagataatcgtttccggtcatttttcctcatcctctctgggaaatctaaaataattgctaaatatgatcataccaaacaatctccttagttttaagaacaaatcttctttttttagtttaaaccacaaaagaacctgcaggcaaaaaaaccgcaagttcttttatcgtttattttgtgtttccagttgcaactggttgcttctctttactattcttctttttagaatgttgctgagagttccggtgggaatgattattttgtcgttcgtttttatgtgtttgattatttttattgtttggtcgacgatagtgttggttttcggaacgattattaccgttcaaaattgtcaccatcggaataatcactggacgacgaccggtgcgatcatagagtaatttttgtaaacggctgataattgtccggtttaatacccgttgatcaatgtgtttgtgattcttaaatgtattaaggattgcccagaatacttcatgattggctgccttaatcagctcttgtgattcatgcatataaacaaagccacgagaaacaatatcaggccccgcaacaatttgataatcctttaagtcgacaaccgcaatcgctgttacgacaccttcttctgaaagcaagcgtcgttcgcgaatttctggatttccaaccgtatctcccgcatcacgaccatcaatataaacatcactaacactatcaatatggtccgccactcgacaagagtctttcgtaagagctaaaacatccccatttgcaaggacaaagctattttcctttggtacaccagtcatttcagctaacttagtgtgaattttttgcatccggtattcaccgtgaaccggcgcaaagaatttcggcttcatcaagcggagcataaactcttcatcaacttgaccaccgtgcccggatgtatggatattgttaacataaccgtgaataacattagcaccgtcttcttcaagcttattgatcaaggcattaacgctagtcgtgttacccggaattgggttacttgagaaaacaacggtatcctcaggctgaatggtaatctggcggtgagttccgttagcaatccgactaagcgccgccattggttcaccctgcgatccagtacacatgatcaatactttttctggtggatagttattaatttcgttctggtcaatcaatgagtctttagggatattcagataaccgagttcttgaccagccgtaatcgcattctccatactacgaccaaaaacagcaattttacgcccttgagcaatggctgcatcagaagcttcacgtaaacgatagacgttagaagcaaaggatgcgaaaataatccgtcccttgatccgttcaaaaatacgccgaatgtgaatatcaacccatcgttcagacttagtaaattccggtcgttctgcgtttgtactatctgaagtcaatagcagaacaccatcatcgcctagtttggccatttgttgaagatttggaccaggtaaattaccaaccggtgtcaaatcaaacttaaagtccccggtttgaacaattgtcccttgcggagtatgaactgcaatccctaatgtatcaggaattgagtgggttgtccggaagaaactaacccataatttcttaaagtgaacctcatcaaattcattgatttcatgcaattcggcatttcttagtaagtgtttttcttccagttttcctttaattaatgacattgcaaatggtccagcataaataggtgcattgaccttttgtaagaagaatggtaatcctccaatgtggtcttcgtgaccgtgagtaataaagattcccttaatcttatctttattttcaatgaggtaatcataattttgaattacgtaatccactcctagtaattcatcttcggggaataaaactccacagtcaataacaataatttcatcttggaattgtacacaatacatatttttaccaatctcaccaagaccacccatggcgtaaaaggcaacttcattgtttttaatctttaattttgtcataatacctttccttctatagatttttatcatgttaattaacggaatttaagtaagccaaaagaaccgctttgttctgacaaggtcggttattgatattcattttattattggcacttaatcttaattatttaatccgtacgtaaaactaactactattttaccacatctacaaaattgaaggtagtaattgcctaattctttgattaaaaaagaaggtgggagaaagtatttatctttactccaccttcctttttaaatcccactagttgcttgcctaatcttcttctggtaactgttcctctttttgttcccaagccttcatccaatcaacaaccggttccccatcttcatgaaatttaacattagtcaatgcggttaaaattttttgataagctggcttacttagccgcgtgcttacattaactaattcctgatgacccataaaagcattatcgcacaagatttgattaattgtagccattaattcattagatacttgtgagctaaggatctctaaactgcccctacgatattgatcaacataaaaattaataaaggaattaagggcaacttctttagcatcctcgcttaactcactataacttaaacctgttgtagccaattgttattcttcctttctcaaattaatttactttggttatcctctacattttaaccttaacacaaagtttattatccgttaattttccttccgatcccgaatacgaagactagtattttcaccatcaatcactgcatatacttcttttgtggaatcttcagctaatgcacccagcttaacttctccactatcttctccagtttgttctacctctttgataccgtccgtaataaaacgggtaaaaatcttatgaagttcgcgccgtttacgttccttttttacagccatcgctaaagtaaagccttgatccaaaaatactttaatcgttaatacctgaaaaattgttggaaaactaaaatagtgatttttattctgctcatcttgttcagatttaatataaccctttttctcccaatatcttagttgactagtagagacaccagttacacgtgctacttcactcatattaatctttaattgtttactagcgatcatttttctaattttttcagaaagcggatccattatttcctccaaagtgtatatttcaatcataaattaccaaaaattcgatatctttgtcaaataatttgacaaagatatcgaatagtattatatttttcacattgttaaaaacgtagaggaggattctattagtgaatcaagagcaacaacctgttgatattaatggtcaaacttataatcgttccttaatgatcttcgtcctattaattggagctttttgtaccattttaaaccaaactattctttcaacagcctttcccgcattaatggatgcttttaatattagtactgccaccgttcagtggttaactactggtttcttaatggttaatgggattatgatccccgtaagtgcctatttaaccagtcgttttaatactaagagtctttttatcattgctatgtcaacctttgaagttgggacaatcttagcatggattgctccatcgtttgccgttttattagccggtcgtcttatccaagcggtcggagtaggaattaacatgcccctaatgcagaatattatgctgactgtttatcctcctgagaaacgtggcgctgcgatgggagtaaacggcctagttattggattagccccagcaatcgggcctgctctatctggatgggttatcgatagttatagctggcggtggcttttcggaatgatcgcccccattactgctttagttatcattgttagtttttttgcagttaaaaatgttattcctaataaaaagccgcatcttgactggctttctgttgttatttcaacattaggatttgggagcatgctttacggattctcaagtgtcggtgataaggggtggacagatccggttgtcctttcaaccattatcattggggtgattttagttggaattctaatcatgcgtcaaaacaagctagacgatccgttccttgaattcaaggtatttgaaagcaaagaattctcccttgcgaccattcttagttcaattgtaatgatggcaatggttggggtagaattcgtcatccctctttaccttcaaatcattcatggaatgtccgccttccattcaggtcttacccttttatttggagcccttttcatgggaattatgagtccaattactgggaacttatttgaccgtcatggtgctaaacgcttagcctttacgggaatgtttatcttaactgttggaacaattccttttgcctttattactcgtgataccccaactatttatattgtcttcttatatgcagtccggatgtttggtatttcaatggtaatgatgccagttactacagcgggaatgaattctcttccttacaatctaatttcgcacggtacagctgttaacaataccattcgtcaagtcgctacttctgtgggaacagcgatcatgatctctgttttgacaaatattaccaatagcaatcgacctgctcattcactgctgacacaatccccattacaatataaagcaaagatgtttgatgctactttgatggggtaccatgcagcattctggtttgcaatcgccttctcactcattggtttattccttacattctttgttacaagtggtaatggaattcacctccgccttgatagcgaagacattgcagaaccaactgataaaggagggatgaagtaatggttattattttaacttttctaggagcactcgccttttttgcttgcatgatgtttattcggcaaaaaagcctgcgaattattttagctacactcacgggaattatctttgtgggctcaactcttttgatgacactaaattacagtcaccattttggaatgcaaaaagttacgacaacaaccaccaagcggatttactctgcttcaaattcctcaatgcccctggcaatttatcaaccggttggtaaaagcggccgcgatgatgtttatatttataacaccaaagttaaacaaaaaacgccttaccatacccaagcaaacgaatacaccactagtcgaattaaatggactaatggttctacccctcagctcgtaacaactgagacgcgctggcaatatcgtaataatttttataaagtcctatatgcatggtcaggaatgaacaatgcattagttaagcgaactaacgtgttagaatatccacgaatgtatgttaaactcacaacgagtcaggcagataaacttgccagagttgctaaatctgctacgggtgccaaattacaagcacaagcagcagaacaaggacgcgcttttgttacatcaaaggttcaagcagcaatggctaagaatcctaacatgactgctaaacaaattcaagaagtatcagcacaagcagaacaagaatttcaggcccaaagcgttcaacaaattttaaaacaagttaagtaaaaaatagagactaagagaaaaagcaatctctcctagtctctattttatatttaatctaattcaaaaatactggtggcaattctgaggtaaatgtcctttgtttaagggtaaagggatcgttaaaactaattttacttgcatgaagcaactgatgatcatacttactagtatcgccgccataaagatggtcaccaattaggggatgaccaatagcagcaaagtgaaccctgatctggtgtgtgcgtccagtgtgaagtcttacccgtactcgtgtccattttgcgcctcgttcttcaacccaatactcggtcaaagctcgttgcccattctcgtcaattacccgtgcagcctgcccatcctttcttccaatcggcttgttaatctcgccatgctcgtccataacctgtccttctactaaagcggtatattccttcagcatttgatgttgctgcacttgctgactgatcatactggaagcgatatgatgcttagcgataagaagtaatccccccgtaaagcgatccagtcgtgtaattaaatgagggcggagatctgcagaattatttgcgattaagtatccctttacccgatttaaaaccgtatcattttgaacggttggtcctgggatagaagtcacccctgctggcttatctactaccaaccaattatcatcttcataaacaacatttaagggctcattactactttcaacagtatcatcagctaattctggttgagccttaatggttaaaggttgattaggaagaatctgggttgttggccgtaccttccgatgatcaacaaggaattccccttcaccgtttttaagatcgttaaataaacgatgccccatccccaatgactgaagatacttctttattttaatcggttcggttcctcggtatatccacgtattttccatcttaatttcctccatcaacattgaaaaagatacaaaaaaagagctgatgacctaaatcacagctccttaatattgaacggtccgtacgagactcgaactcgtgatctcatccgtgacagggatgcgtcctaaaccaactagaccaacggaccaacttgacaacaaataaaagtatacgagatttatcgaaattagtcaacaaaaatttgtgatttatttttgatttttcgtttttcctatctataccgtaaaaattatcaatagtttataatgaaagtactagctattattaaggaggagtttttaatgcagcagttgggcaagcgcctattaaactggtggtctaagtattcaaaaatcataaaagtagtgtttgtaacctcagtcctagtctttgttattctcgcgttaggtaacttttttaaaacagttaaatggcatgaagtaggagttggtttagcaaacctgtcttgggaaagtatcatcctgctactaattacgggatgcatcgcagtcatccctatgttggggtatgattttgcaatcactcatttattacccgggaaatttaagaaatcatatattatccgctgtggatggattactaatactttaacaaatattgccggatttggcggaattcttggttctactttacgagcatacttctatcgaaagaacgcaactaagaaagagattctacttgctatctctaaaatcgctgttttcttactctctggtttatctgttctttgttgggtagctttgatcatcatgtttgtgtttcacgatggcggccacttcaaccaatacgcactttggcttgtggggggcggattatattttccaatcgttttttattttactgttattcataatagtaaaatatttaagaatatcacgcccaaagtagggacctttttagtcaccagttcaacttgtgaatggctatttgtagcactttttttcttactagtcggttggtgcttaggcgttcggcatagccttattagcgttctgccattatacgttgttgcccaagttctcggggttctttcaatgattccgggggcacttggttcgtttgaccttttaatgatgttagaactgtcattacttggcgtttcccaaactacctctgttatttggttattactattccgaattttttactacatcgttcccttaattattgccggattcatgttcttgcactctcttgcatcccaagttaaccagtttttcgacggattaccattgctaatggtccgcaaacttgcttactatttaattacaacgtttatgtatgtttctgggattctgatgcttattactgcctcaattccagacatcacagcacaaaataagattatcgcgaacctttatccctataccttcttcttcctccaccaattgacaaccatcttatttgcactggctatgcttgcctgtgctcgcggtcttcaatcaaaggtgaaaaaggcataccttcctactttaatattattggtaattggaattgctaataccatttggaacctgggaacattgagcttaacaatttacctcgtcattgttttgatacttgttttactctctcgccatgtgttataccggaagaaattggaatattcaattggaaaattcgcaattgatagtcttatctttgctggagcatgtatcctctatgtaattgtcggggttattaatgctcctcaatattccagtaagcaccacatccctgattttctatttttccctggtgaaaagatttggatttccggacttttcggattaatcctcggcctcttattaattttcgttattctgcgctactttatggccgggactgatcctttcaatattccaaacgtatttgatgctgaacggatccgcaatgttattaaagaatatggaggaaatgaaactagtcacctcgccttcttaaaagataaaagtatctattattacagtgttgacgatcatgataagctctttttcatgtatcgccgtaaatatgatcgcttggtcgtaatgggcgatccagttggagataaggatagttggcgaccagctcttcgacaatttgtcttagaagctgataagtatggctatcagcttgtcttttatgaagtctccagcgatatgacaatgcttcttcatgaatttggcttcgactttattaaaaccggtgaaactggccttgttaagctggcagactttacgcttgctggtaagcgacaacgatcacaacgagcattgatgcataaatttgatcgtgaaggctataccttctctgttgaaaagccaccatttagtaaagaattaatgcaagagatgaaacaagtctccgatagctggttaggaaacgaaacagaaaaaggattctctctcggtttctttgactcctactacattaatcaagcacctgttggcattatccgtgataaagacggcaaaatggtcgcctttgcaacgtttatgccgacagggggtaaaaagattttaacaattgacctcatgcgtcatagtaaagatgccccttctggaatcatggataaaattttcattagtatgttccagtacgggcaggaaaacggttatacctactttgatctcggaatggcacctctttcgaatgttggcgaatatcaatttagctttattgaagaaaaagctgcacacttcatctatgaatatggatatcatttgtatggctttcaaggattacggcgatacaaagataaatatgcgacagtttggtattcacgttatactgccttccgcaagaagaattcaatcattgccacaatgatgattctagttagtgtcgttaaccaacgtgttgatcagcaaaaccaccgttcaatcttctggtggttgattaaataatcgagtaggagataattgattagttcaattatcgacctctcacaccaccgtacgtacggttccgtatacggcggttcgacaacttaatcacattgaattgactggagcgtcttggacatattcataagtccgagttgttccagttttctattagttagagaatagctcaaggtcttactgtgtgcagttcgccagtagcccttgcgggtactagcgaagacatatgcatcacgctgggacagccccagcttctgtaagttagttaccttagttttaagcttcttccattgcttccagatatactgtcttattcggaccctcaaccacttgtcaaggcgttgaataaagtcagttagttttccaattgagtagtactgaagccatccacgcatttttcgctgaatttcttcaaacattcttgtcagggatattccacgattacgtttagttaataacctcaatgctttctttactcgttgttgcgattgtttagctggacgggcgtaggctccattgtggtctacacccaacgaaaagccaagaaactttaaccgtagcgggctaccgactttggttttatctgggttcactttaactttcaatcgcttttcaagaaactgggtaatgcttcgcattactcgttctccggctcgttgacttttaacataaatgttacaatcatccgcatagcgcacaaagtggtgaccacgtctagtcaactctttgtccaactcatttagatagatgttcgccagtagtggtgacaatggccctccttgtggggttccttttccactcttagcgaaaagcccatggtctaagactccgctagttagaaacttacgaatgagtcttagtgtccatgggtcatcaatatattgttggagatacttaatcatcaagtcatgattaacgttatcaaaataggcttttaggtctaagtcgacaactcttcgataaccttgattataaagatctactacttttgcaatagcgtcgtgagccccacggtgagggcggaagccaaaactattatcagagaaaacacgctcaaagataggtgtaagaatttgggccacagcttgttgaaccattcggtccaccactgttggtattccgagttttcttactccaccattaggcttcggaatttctacccgtttgactggtgctggtttatacttgccctcacgcaaactagcgatcaactccgtcttattttctctgagatatggcagaaggtcattgactgtcatatcgtcaatgcctgctgcccctttatttctcttaactcgcaaataagcctgattaaggttattgcggtccaagactaagtcttggatagtgacactcatacctttaccttcaccataatcggtactacgcgcccttgtgtactttcggttttccaaacctatcctcgacaagcggtcagcttgttgttctgttttctgcgattgtcgcacctgattacacctccgatataagttacaagttattgtcgttcagtccttcatctgattactcagactactatgacctcggctgacttctggcttactcaacgctacatcactgcaccgcttgtttctgtggaaattaaacttattcctcttgtcggaaacgtgtaggccagatctccccgggtaaggatattaactttcgtaccatgtcaccggtagctttactgaaagtaacttcgagtagtgttggactttaacttgtcatgcagtcttatccagttagttccagccttatagctacttcttgttcatcggtgcagtactttgccttagacttccttcagattccacctcacagtggacacccttgtcctcagctcatggttccgactactacggcccatagcggactctcaccgcctagctaatacccatgccgggcgcacatgttaagagggtgaggaaaaacttttccgtttttcctcaccctctttacttttatcgcctatttttgatccattaaataatcatatagcatctcatgcttaatcttatcagtgttgtatcctaatacctctgcaatctgataagcaaaggctaaggcagttgcaggtccacgactggtaatgatttttccatcattatcaacaaccgtaatatcctctttaaaatttgctgttggggcaaccttagcaatttcctcgttaattcccgggaagcaagtatagttatgattatcaagcaacccataccgagccaaggcaatcggagcagcacacattgcggcatcccacttattttctgcattgcgtttttgcatcaatttcatcaacttatcattatcgcgaagcttttgggcaccccgcgaccaccaggaaaggccaccacatcataattgaggagccgatcactcattacctcatcacaagttaattcaattccatgagcgccaggaacatgaagatcctctaatccgaccattgtggtttcaatcctcattcgccggagaacgtccacaattgtaagtccttcaacttcttcacaacctggtgcaaacactacagcaactttagccaaaatatcaccccatcaattattaattgttgcaactacccgtttcattacaccctttgcttctggaatttgataaagcgggtaaatatgaaacagtccacgaccagtatatgagtttacagtgatcccagcgttacgcaatttttgaacaaacaaggtcacatcaggatatagtatttcccttgtccctacaaaaacagtcacatcgcgcaactgatcaagattcccatataagggacttaagcgatagtcttgatgatctgtatcaccggcccacatcgtaccaatttttcgtaaaccgttcactgctagtgtaacatctttatcctcatatttgctaatgaggggatttgtgaggtcaaggtcaagccaaggagaaaatagaatgaggtgaccaggctgtggaagcccctttttaccaagatattcacaaaagccagctgctaatcctccgccagctgaatcgcccataatagttactttactagcaggcataagggtataaattttactataaagactagcaatttcttgataggcggtacggaaagtagcatgcggaactaacgaataaatcgggacataaatcttcgcatccgtggcgattgccaaccgatttaaatattgccaatgagtcttatcgggacgctgaatataggctcccccggttagatacatgattactcgttgattatctccgtgatcatttaagacatatgttgttacttcctgttcttgacgctgaacatcaaccgtcatctcagcagcaggtaagtagtaatcagcttcattgtcaatccatgcattacccactaaggcattaaatttattattttctgcaagatcatttttaaacccgcttaattgaattcccatttcagtaaaggttgctttactagaacgatgagcaccacatcgccgtaactctcgcaaactattctcaagattattagccaaatgactagcaatttgagtattaaatttttttattttctccactgaaacgatcgctcctcatttaaaatcttactattatcctatcatgatttaagattttgtgtctttaagattacctaaagccattagctcgcgttgatgacaatggttttgccagcctaaaactacaactaaaattaaggcaataacgattaaaattactgccgcaatgataatgtcgcgatacccattataaagaatcatacgcagggttggtaaaagcttatctggaagactactagcagtttgggcatttgataatttatttagcattcttaaggtaattccgtggtgcgtttgaacaccctggaatagctcttggttaagaataactccatacaccgcggacataagggtctgactcaaaattcgcaataagtatcctagcgaagtagcaattggtacatcccgtaattcagcatctgtttgaacattaatctgtaaaatattaaagacaagaccaacaccgaatccttcaaaagcacccatgaataaaataagccagaatggtgttttttgccccccaatcattattcctaaataagcaataaaaattgaggctgccccacaggtaacaatccagtattttccccatcgctcctgcaataccggtactaattctgaaccaataaagttagtaaccgcacctggaatttgcgtcattccgccaagcagcgcacttaaacctaaaattccctgagcccacattggaatataagtgacaaatgcaataaatgaaccccagattataacgaataaagtaaaatcaattaccaattcgcgatttttaaacagacggctaggaacgattgggtcgaccgccttactgtcaacttttatcattccgccaagcaataagagaccaacaactaataaacagcccactactaagccagaagctgaaccaatcaattgaacagctactaaaattattactaaactgactaccagtaaagttgctccaagataatcaactggcttacctgcagcttgctttttcacattcttatagaacaagctaatgatcgtaatcgcaattaaggcaatcggtacattaacatagaaaacccagtgccaactcaacgcgtcaacaatccatccaccgagtagaggaccaataatcgaagcagttccaaaacaagcactggcaattcctaatacttgggctcgtttttttaggttgtcgtacaattcagcaaaaacgataaacgggattgtattcattccgccagcaccaattcccattacagttcgcgcaataataaaccataaaatattaggggctaatccttgaaagatggctccgactaaaaacatggaggtagcagtaatataggcttgcttatttcccttatgctcaccaaacttactccataatggggttgcaacagccattcccaaaagaaaagttgcgatgatccaccccatatattgcaacccatgaaggtcactggtaatagctggcaaggccgtatttacaatcgtaccatccatccccgccatgatgttagatagtaacaacgcaccagtaacaattgttcgtcgttgttgtaattccactttttcatctcccttaattctctacgtactaaagaggatggaacagagcatcaaagtgcgttgtcccatcctcttgaattacaaactgtttcccattatacgacctttgtcacaaaaagtataatggttattttttcattttcttaatgtcctgccctaactgttgccagtcagctttaatagtaggctccaatcggcgggcatagagtactgcggccggatgatacatcggcataatccaatgcttatcagtcgtcaactcataaccatcatgcgcatcattagtccgttgaatcttttcgtggagaagttgcccatgaagcttaccaatattggcctgactaccaagcagccgttgtaaagccgtattgccaagcgtaacaataattttcggcttaacttgagccagttcccaatcaaacaaaggagcaaatgctaagacttcttttttagttggcgtccggttaggccgtttttcaattacttcacctgtcttcttatcaattgccttcttaatactataaggccgttgacgaactacactagtaatataaacggttgaacgcgagtatccaattgattcaatcaatttcatcagttcctgaccggaagcaccagaaaaaggaatatttaccttttcttcgtaacgaccaggagcctctcctactaacatcaaatctggattaagcggtccttgacctggagtaaaacctgttaattgccgatccttcgtttttccttttacctctgccagtagcgttggcggatattctgcaatcatgttcgtaatctcctatccattatgtcgccacttagaatctgtaagaatacgagcagcgatcaatcccattggcaagaatacaacaatcataagcgccttggtcatccaaagcgttcctacactaatcgaagttaaaccgatattatacattgcccgatacatatagagtcccgggaccataataacaatcgacggaaccgtgattgaaatttgtggatattggattttacgtttaacaatcgatgccaataacccggcaactaacgcccctaaaaatgcggctgcccctgccggtattccggtcaagtccgttaattctaagcgtaaagtattagcaatcgccccaatacaaccggcaatagccgccattttaggcgtactgttaaacattattgagaagccaaacaccccacaaaagctggctggcaaccggagtaaaaagagcattaatgcagatagcggcaatgcttgaaaattctcaggacgcaggttaaccattaatgctacaatccacccgaccaaggtagcaactgtaataattgcgattgcataggtcatccgttcaagcccggaccgcatatcaagttttgaaatatcaaggccactagtaataaatggaaatcctggaataataaacagcattgcgccgatataccctgcttcatgacgcgaactcacattaaacgttaattgcatcaaacttaaagccaacaggtaagaaaggcacgcaactgcaaccgcaaccgctactcccgcaaataaggtaatgtgatggtcaatcatcttacgacggacatagtttccgaggccagccccgataaaactacaaaacatttcaactggtccaccaccgagtaaaaagacgaaggcgctacatgccagagcggctgctaatcctacttggtaaggagcgtaattcccttttgagtgggcaatttcctccaaacgggagtgaatttctccaattgtcatctcactcccatgctggtcaaattctttaataaatcgttccatctgcgaaagttttgtcgtatttacacttgtgcttggcaaagatattgcctgcgtatagctatgatgggcatccatacaggtatactcgagggaaactaacccaatatcgaccgaacaagtcatttttagcgtccgggcaactgtattcattgaatcacggactcgccatgcccctgttccataagaaagcatcattaatccaattcgcccgacaatcgctgctcgttctactaaattagcctcatacgcaggggtgaaattatcatttgtaaaaaagtcatgccatggaatcgccatatgatgcttatcagacaaatgttcagtcggctcaaaatcattcgctgagatctctttatccttactcaaaacccatcaagctcctcttatcaattctcttaactatttaattatacggcgactgtcaagcgacgggagtaatttcttttaatttagtgattagttgctgctcatcatcgcttaaaatgtaatcctcccgtgtagcaagcgaaataaaaaatttttccggaattgggtctttaatatcgagggcgacaattcctggttcatcctttaccgcatctttaaccatcaaactaattcccttattttgccgtaccaactctttaatccaggaaacatttggcaccttataaattgccgtttgtggattaatttgggcataggtagaataggtctgaaaggcagctttatgcacatattgttggtcataattaataaagatttcgttagttaagtcttgaaaactaaccgcctttttctttgcaagcggatgatcagcacttacgatgatactaaatggtcgcgtagttattaattccgcaaaaatacctgcttgatcaattggtgcaattgagcccaacattgcaatatcgatctttcccgcttgtaattcacttagcaattcatgagatcccacagaaacgatttttattcgttggagaagctgcttagaaagattgccaataatgtgtgaaatatacatttttccaatgattggcggaagaccgaattttatttggcgttgatcggaccgtgctatttcttgatgagcaatgtctatttttttgtttatcgccaacgctttttcatataataactgcccactgcgcgtaatcatttcatccctatgaacacgatctttgcgcactaattttgtgtcaaattcttgctcaaggcgacgaattgcctgggtaatactaggttgagaaacattaaaatactttgctacttgcgtataattttttaatttaactagcatggcaaagtattgtaaatcacgagtattcatcgtcttaaccctttctatgtcgaaataatatctttatcttacgtcaatttatacttgaatacaaaagaatgttcgcaaaagaaatcaatcttttcaacaagacggtcggctaaactatcttcatgttatcttgttatttaaaataataaggctggggaatttttcatttctcccagcttccgcactaatcttaagctattcaagtaaatattaaattattgatgttcttttaagtaattgtccattattttattaaatttgtttgcctgttctgccattattacatgaccactttgatcaacagcttgatgcgagataaactgtggattagcttgtctcataacatccgcaaatttaccattaaaatatggactttgatttgcggtaactaataatgttggaatattaattttttcaagtgttaatcgccaatcccgtttagcgtgatcatagagtaagggaagattttcggccctaataaatggaaacatttctttttctggctctaattttgatattacttgagatggtaccccatttaatgtctctctaacattaccatgctctttcaattttaatttatacgatgcccttgtgatatccatatatccataaggccattgaaccgtattaaacatctttggagattgatcaattgctattacaccacttaacggaaaatcagtataatatgataaaaatccatatattacagatgctcccatagaatgccctattagaaaaggttttgttacattcaaatgatttaatagttcatacaaatcctttattaaaggctcaatagaatctaactgctcatctctagttgatgctccatgatttcgctgatcatacgtaattacttgataaccttgctgaattaagtttttaatttgtaaacaccatatttgttgatagccgccaaagccatgaattaaaacaactggtttcccagtaccataaacatagtaattaattcttatcccatcacttgttttgaagtccatcaggtaaaccttccttcactaaagctaaaaagatagtaactattaataaatcagcagtacctccaaggcttaaattttgctgagtaaatttttcttcaatttcagttaatttttgttgcccagctttagtccttattccaccaagatttaaacactctttaatttctttatttttccattcttgaatagccggatcccccgctcttttaattaaggtcgaatcttcaatatgtaaagctaattctaaaaaagttattaaaattcgactattccaatcatagtttgatgttaataaggtcggtaacccatacttaaaaaccgtcgggtatccagcgtgtgcttctcctcgaataccagaaaggccgtattttaaatattgtttctcacccgcagttagaatttttttcgatgaaagatgttttagatcatcattaatcaaattttttaacatctttttaatcacgtttttaatatcatttgcatcaaatcgttttagatgctgtaagctgtaggctgttgctgtaacaaatactcccaatgaaaaaactgctcctttatgagtattaacattatttgtagcaacaaacattgttttctcagcttttttaccatattcacgtaacttttcaaatatcaatgataaattagcagaacgactcattattcccagtaatgctgcttgatgaagatagttacgcaaactaatagaactattaataaacgtaaatatgtccatatctaagtgtgctccatgttcaactggatccactaatccgggcttaggccaagcagatacttcatataaaagagctcgctgtgcaagttgagttaaccaatttgcaatgttttctttttcttgatataccaattctacgcaaactagctgactaactttttcttgtaactcttcaaccgaatgtcgacgggagcgaccacattctttagctgggcgaccacaaattaaacactttctagcaggttgatttacatctgaccttgatagtgattttattgttccactatcattagccagcacatctaagtcaaataaacgataacttggcttcaattcttcaaaatgacttgtaatctcttttactaaaattgctcctgtatcaacaagatagaagcgttctggaccggttttcttatccagccactctttttttgaaataaaaacaattccagcatctaataacattttttcaaattcattgagaccagctataaaaaatgactctatctttttattattctttattggaccaggaatatttaatttagctgctacaacagtcattgatggattagttttcaataactggttttgtatttttacacgctcatccttattttttaaaacggcaagaatgtcttggtattcaccgtgatcaaaaatagtttgcatactaactcctcaaatcaaactttaacattaattatagcaataatgggtataaaaaacggtactagaaaattccagtaccgcaatttctattcgtaattagtccttaatttgtttaatttcatcaattaaagtaccatcacgatattcaacaagtgcaactgttcgatcagtatattcaatcttttctggcttaccaacaatcttttctgcacgttgttgtaattcttcaattgaaatcaatggaatacttggcacattcttgaatgcttcaattaaatctttacgtgcaggatttacagcaacccctacttcagtaacaacaacatcaattgatgaacctggggtagttactgaattaacagctggtacaattgttgcaatccgaccacgagttaatggtgcagaaataattgtcatctttgcagtaccagcatcttggtgtccaccaacagcaccacgaatttcaccattagatccagttaaaacattaacattgaaatcagtatcgatttccaaagcagaaagaattgcaatgtccagttgatcaaccattgctcccttgttatcaggatcagcataccatgatccgtcaatttcaatttgaccaggattactcttcatacttgaagcagcacccttgtcaaaatcttgaacatccataactttctttactaatccctcttctaaaagtttaacgattggcgaagtagttcccccacaagtaaaggaagcagtaatgttgttatcaatcattgcttgacgaaggaaacgggtaacagctaaagcagctccaccagtaccagtttggaatgagaaaccttctttaaagtatggagaatttacaattacatcattaaccatctttgcaatcttcaattctttaggatccttagtgaaacgtgttgcaccactaccaatacggtctggatccccaactttatcaacttttacaacgtaatctacttgtgtttgttggattgatgcaggcgtattaggataatcagcaattgtatctgttacaagaacaactttatctgcgtacttggcatcaactaatgcataacctaatgatcccaaagctgattcaccattcataccattagcatttcccattcgatctgagttaggaacaccaataaaggccacatcaattttaatgtttccattttcaattgaacgtgcacgattaccatgtgaacggaaaataaccggattctttaataaaccgtgagaaacggcttctccaagacttccacgcataccagaactagtaatgttagtaattgtaccagccttaatagcttcgattaccttatcattcattaccccagttaacgatgatggagccaaggttaagtctttgtaacccatcttgatgattttatccataaccatgttaaatacaaagtcaccattacggaagtggtggtggaacgaaattgtcatcccgtccttcaagttattcttgataacatcatctaatgaatctactaacttatcgtcacccttggtaacacgaacatcatgaccagtatagtgaacaattggatgaccaatttcagtagtttcaaatggcttgtagtttgttgaatctaaaattttatctgaaatttcgcgtccgactttatttttcaatgtattcgccctcctcattgatcaagttagaagcctttgctaaacgaattacccgttgtgcacgtaatacaactgggcggtcaaccatttgaccgttcattgagataacacctgaacccttttggtgtgcttcttcaattgcagcttcaacgtccaatgcattttcaatttctttcttggttggttcataaatcttatttacccaatcaatttgacgagggttaacaagagatttaccgtcaaatcctaattcgtgaatgtgttcagtctcacgtttaaagccttctacatcattcatattagtaaagacagtatcaaaggctgcaatgccagcggcacgtgctgcgtgaagaatcatgttacgagcaaattcgagttctgctccatctgggtaacgatgagtcttcatatcagtcgtatagtcttcagcagaaagtgccaaaccaatcatccggtcagtacttgcagcaatttctggtgcattaagtactcccttagcactttcaatagctgccataacatgcgttgttcctggcttaataccaaatttgttttcagcttcttctactacttttacaagatctagcatcatttgagctgattctacttttggcaaacgaacaacttgaataccagcttttaccattgcgaaaacatcattcttaaaaaatggtgtatcaattccattaacacgaacaactaattctgaatcaccataatcttgtgtttgaagagcttgataaactaacatccgggcagcatctttttctgccattgaaaccgaatcttccaagtcaaacataatggagtcggcaccataaataccagcatcctttaccattccggcattgttacctggaacaaacatcattgtccgacgtaaacgttcttccattattaaaatacctcccagtctggttgatctgctgtatcaagagcacgttgagcagcagccattgtccgtgctttaattacacaatctaaagctcctttatccacagctttaacattggcattatcaattccataagcagttaaagtatcagtaatcaccttacgaatttgattaccataaagttcttccacagaggaatctaagtcaatgttgataccattattaccttggctcaaagtaatttgaatatcggaagattccaaagttcctgctaatgcagtcttcttaatatccattatttaatacttccttcctttatccgagtttgaagctcagaccagttgtttttaataaattcgagcgttgtatctggaacatacttttttactaactcaatattatcattagcaattgctgctcgtaccttcgttgctgaaataatatcctgatccttgtttttctttcgatcaataatctttacttcaacatcaggtggtagaaccctatttaactcttcattatatatatttgttgttttggaatatggttcattcccaagatatcgagatgttatattaagtggttttgcaatttgttccttaaaaagggttgcatccaaggaagcttgaaatcttccaacattttgatcatcttttaaaaagtatgctggaaacgtagcataactaaccatgtattccttacctggtactactataacatttggtaaatcagccactccagctttaactaatttaaagcgttcagaaaatgaaaaaatagaaacatcttcactaacaacgaaaacatacacatgatcattttctttactagcagtttcaactaggtaacgatgtccgtttgtaaaaggattggcattcataactattcctgcaatcttactttccttttgatcattaaagttcggtaaagaagaaatatagtcatgaatatcaggagtaccactttctaatacagttccttgttttacttttgctaattcatgaaatccaacatactggaaactttgactatattgtggtttcgtaaaaacaaacaaatgaaagcgccccatcattgcagcttcgttttctaatttactaaccaaactgttaaatgtttcaccatgtccctgaacttttgaacaaattgcaatatacttcaatacattaccagcaattgatccagttgctaaaatctcaccattttcttcccatacaaaagtcttatcaatagaagatgtttctttttcagaaaaaacttcaattccattgaaccgcaagaacttttgccacttggtcaaattgcgttttaaatgaatgttaatttcacgaacttccattaatattctcctaatcgttattcttttgacttgcataatgttgaacagctttagctactgtatttactacaccatcatcaaatactccaggaacaattttttcagctgttggattagaaatcatatttgctaatgcagaagcaattgctttttcaaggccgaaatcgactttatttaaatcagctgataataatcctttatataacccgggaaataccaaaatattatttacttgatttgggtattgacttgagccagttgccattactgctgcatctgcatcttttgcaatttgaggatcaatctcaggctttggatttgcaagtgcaaaaataattggattcttagccattgtctttacttgttcacttgttaaaacatctgcatcagaaagaccgataaaaacatcccgatcctttaccgcttcacttaaattcttataaggagtttgatcagcactttgttttactaaatctgtttgataatgattataattttgactatcaacatgcactggtccatcaatatcaacaaatgtaatatttttaatacctgccgcaaaaagtaatcgagctgttgcaactcctgacgctccaactccattaattatgactttcaaatctttcagatttttctttactactctagcagcattaattaatccagccaaaacaacaattgctgttccttcttgatcatcatgataaactggaatattaactactttagacaatttctcttcgatttcaaaacaacgaggtgctttaatatcttctaaatgaaaacccgcaaaagattcctgcatattctttaatgttgctacaaattcattaacaggaacttgctcaacagttaaaggtagtgcattaacattagccaaatccttataaagtaatgctttcccctcaacaactggaagaccaccggctgggccaatgtttcctaatcccaaaacagcagagccatctgttactaatgctacaagttttccactaagagtatatttatcctttagttcgggataacgttctataagcttagagattatcgcaactcctggagtatacgcttcacctaattcttttcgatttttcacttcaaattgaggtgcaatattaagtactccttggttcttagcatgcattgagagtatttctttatcttccatttatcgaaagcctcctcatttcattattaatatcttaccacctttttaaaaaaattaaaataattactgtattttttaaatatttaaaaaataatgatatacttaaaacaacattgagcatgaaaggaataaaaataatgaactcacagcatcaacaattactcggtaaccttgcacaagattattaccttagcaaaatggcaattagtgatatttctaaaaaatataatcttagtcgctacctcattatgaaataccttgatgaagcattttcaagcgggattgttgatataagcattcatacagattatgaccgaaatgcccaactagaacgcgaattatcaaatagttttgatataaaaaatgtctatgttattaaagatccaagcaaccccttggaccgcgataaaatcattgctaactttgcagctaatcagatccaatctcttattaaagaatataaaataatcggattatcgtggggggaaacaatttatactattcttgatcatttcagcaaacactcttcccgcaatttagttttcacacaatttatgggtgaaaatatgaaatataaatcttctgccgcatcaatgcgaatggtacaaaaagctgcatccaaatatgattgtccttattacaccattcccggaccactttatattcttaatgacgaagcaagaaatgacctatattccgaaccggcttttacagaagcatttaaggttgccaataaaatggaaatgattgtttgtggattaggcactctccaatcaatagacagtatccctgcttggcatgattataaaaagaggttatttaaaggagttagtttaaaccaaattgctggaatggcatttggtcgtccatatgatattaacggtaactttctaattcatcccactaacgataaaactctctctatccctttaaataaaattcttaacgttcctatacgctttgctattgttcaacgcaaatcaaaatatcaagccgctttaggagcccttcgtggaggtttatttactgatatgatacttacagaatcaatcgctttacgaattattgaagagttaagataaaataaaaatccgaattcccgttacgagaattcggattttttatttacttcttctaccaaatgccaattaggcgcatccagaaggttccaataataccgtaaacaagtaagtagaagatacctaatataaagttcatcttccaccattcgctctgagtaacgtaaccagatgatgataaaatcgaagctggtccgttagcatagtgagtagtagaacccatgatagcagaagtgaaggcaaggagcattgcagttaacattgctggtgctccagcagcaatcgctacagaaacgaaagccgtgtacattgcagtaacgtgagcagtagcactggcaaagaaatagtgagcgtagaagtagacaactactaatacaactaatacccaaatccagctaactccgtgaagggcaccttcaatactgttagagaaccatttaatgaagcctaacttagtcaattcactagccatgaatactaagattgaaagccaaatcaatacattccaagcaccagattcgttcaagacgtccttagtttccaacacgccagtaataagcagaagagcaattgctaagaaagccacaaaagtcgcgttaatagcaggaataaaactagtcaacatccataaaacaagagtcaataagaaaataagccccatgagcttttcagaaagcttcatgctacccatcttttcaagttcgctattagcccaagtcttagcgtttggtgtttctttgatttctggtgggtacatcttgtagataatgtatggcacagcaattaaacaaagtacactaggaagaactccggctacaaaccatccaacccaagtaatattaatgtttaatgtcttagctaaggcaactacaaccaagtttggtgccatagccgtcatgaaggttgcggaagtaatcaaattactgtggaattcagtgaaaactaggaaagaacctatctttttccgagtacctttctttgggtcagacccataagtttcagctaaggacttaataattggataaactaccccaccagcccgggcagtattacttggaatggctggtgaagtaaccaaatcaattcccataatggagtatgctaaccccaaactatgttgcccaaaactacgaacaaagaccaaagcaattcgccgacctaatcccgttttaataaaaccacgggaaagtaggaaggccattgcaatcagccatgatgacgaattttcaaaggcctttaatgcctcttccatcggtacaatgccaaccaagaccataattgtgaacccaactaaagtcgttccggcaatcggtaacggctgggtgatacatcccacaatcgttgctacgaaaatagcaaacatatgccaagcagccatagaaacgccatcaggacggatcggaccgcagaaccataagattaagccaacagcaacgggccatgcccatgccttagctttaaatttagctaatcccattatattaaaccctctttcaattaattcttaataaccacaccatctaagacatctttcatcttagcagcagagtattttagtttttcgatttctgtatccgaaagtccgtaatcaacgactttttctattcctgttcgattaacaattgcaggtattccaagatacaaatcattaataccatattgtcccattaaaggggctgatattgggagcatgatattacgattttcaataatcgcttttacaatataagcaagatatttagctactccatagaaagtagctccttttccttcgataatcttaccaccacgttctttaactgctttttcaagttcgctatagtcctgagcagttaaatcagtaacttcttttaacggttttccattaatagtggcttcatcgaatgcaccaaacgatgtatctccatgttcccctaaaactaaagcatcaatttcatttactggaacatttaacttttcagataaaagtacattcaatcgagccgtgtctaatgaagtaccagttccgataacacgatgcttagggaatccagagagttgttgtgtcactgtagttaaaatatcaacaggattacttgatacaacaaaaataccgttgaatccactttcaacaattgggttaacaatagttgaaagaatctttgtgttccttgaaacaagatccaaacgagtctctcctggcttgcgtggaactccagcagtaataactacaacatcagcatcagcagcatcagaataatcccccgcatgaatgttgactggactagttagtggagtaatatcttgtaaatccaatgattctcctgttgccttctctttctttaggtcaacaataactaattcatcaatttcttgtgttgtttgaaggagtgagaatacgaatgatgatcctacagctccatcaccaacaagcacaactttatgatgatatcctaacataaaattttcctccaaataatatacaaataattgctctaggcagtttctcactgcccattatttttttactttaagccacgggcgtaaacagttacttgttgacctgcttgacgtccaaagacaattgtttctgcaattgagttaccaccaacacggttattaccatgtaaaccaccagcaacttcacctgcagcatataatcccttgattacatccccattaccatcaagcacttgagtctttgtattaatatgaataccacccatagtgtagtgaattgcaggtgcaatatggattgcaaagaatcctggcttagtaattccacgatccattcctgttgtccgatggaattctttatcgtcatgattttcaacagcttcattccatgttgcaactgtcttctttaagttctcagtatccatgttgaggttctttgcaagatcctcaatcgtatcgccatgaacaacaagaccaactttatcgtaaaattcaattgccttagcatggtcacgaataccttggtcaaaaattaagtaagcactgtgttctggaagggaagtaattgcattagaaacaatctttcgagtgtttaattcgttaacaaaccgattaccttcagcattaactaagattgcaccttcaccacggacagcctcaccaataaggtaaacatgaggattatcttgttgaacagttgggtgaacttgtacaagatccatttgcattaattcaccgccaacgccttcagcaagcttcaagccatcaccagttgctcctggttgattggtagtcttgtaatcagcaaggtcagggcggaaccgcttcatgtattccttagaagcaccaaatccaccagtagctaagataacagcctttgcgtggatggttttaattaggccatcagcattagcttcaacaccgattaccttaccctcatcatcttgtaagagcttgttaactttaaccttattaaatactggaatgttttccttttgaacaacttccaataaactttttactaagaaaccaccaattggcgccatacttgctggacggtgagtacgcttacaagacattccaccagtaattgtaatgtcatcaagcttaatcccatgatcagctaaccagtcgattgctggagctgtgtgatatacaaagtaacctagcatatccttgtcgtttagacgtccaccatcttggtatgtttcgtggtagaaatcggcaacgttatcaattactccatgttgtaattgcacattggtttcagcggcgttcattcctgaagaagcccggttagtatttccaccaagttcttcttccttttcaagaacgaccgtcttcattcccaattcgtttgcttgaattgctgcggaaagacctgttccaccagaaccaattacaataacatcgtaatcattatctaatttacttacagataatggttggaatttttcagccatgatattgctctccttttaattatatttaaatgtattaacagtcaaaaagagtggaacaagttctttttattgcttatttccactcttgccaaaattggcattacttttaactcaattcttatttatcacgatcaacgttggtcatcttaagcatgtccatccattcatcgtattgttcttccgtaagcttaccagacttcaaagcagcttcttttaatgtgctaccagctttatcagcagcttgagcaatcttagcactgtcatggtaaccaatgtgtggtgacaaagcagtaacagtcatcaatgaattatcaactaattcttccatccgcttttcattaactgtcattccgtggatcatcttgtcagcaaatccagtaattgttccagttaataagtcagctgattcgaggaatgcatcgattaatactggcttgtaaacattcatttcgaagttaccttgtgatgaagccattgttactacagtatcgttaccgaatacccgtaaagcagccattgttacagcttctgcttgagttgggttaaccttacctggcatgattgatgaacctggttcgttagctgggatatttaattcgccgtaaccagcacgcggaccagaagctaagaaacgaatatcttgagcaagcttgaacatgtcagctgctaatgtcttcaaagcaccgtgaacaacatctaaaccagagtggttagctaaaccgtagaacttgtttgaatcagcagtcaagtttaagccgtaaacttcgctaagcttttcagcaatcttttcaggcattccttctgcagcattcaaaccagtaccaacagcagtaccaccaattgccaattcatctaatgttgattccaaagtcttaatgtaatcaaggtcatgttctaaggaagcaatgtaaccagaaagttcttgaccaaatgtcaatggaacagcatcttgcaagtgagtacgtccaactttaacagtcttcatgtacttctcttccttaacctttaattcatcaattaaatgttgaacagctggcttcaacttatcaagcgcttctaaagcaactacattcatagcagttggaaatgtatcgtttgaactttgacccttgttaacatcatcatttggtaagatttcaatgtcagggttaatttcatgagccttgtgcgcaacaacttcattagtattcatgttggtttgggtaccagaaccagtttggtaaacctttaatgggaagtccttccgcaattcttcatcacttaatgcgagtaattcatcaatcgccttaacgattaaattacccttttcttcagagatagctttagtttccatattagcttgagccgctgcctttttaatgttcaataaagcacggataattgctaatggcatgtattgaccggttgggaagttattccgactccgttctgtttgtggtccccataatgcttcagcagggattttaacaggacctaacgtatcttcttcagtacggtattctgacatctcaaaaacctccaatatattaattgagcaattttgtcttgtgaaatgttacacatcatttacacgtatatcctaccttgtaagtaaagctatagtcaaatctttaattttcaataaatttcacttatagctattgccttgccaactgttataatagcttttttcaattacgtttgcaaaagtttcacaaacttcgatacaaaaaaacacctaagattttttaatttcttagatgcttttctatttttgtctaataatctggttttattattcacaaagatgaaagctgcttgattaatattgaggcttccaaattttttctgctactacgctcttcgcatcagtaattccgtcgccggctaggccttgatcgatagcagattcagctactcgttcagccactcgcttagaaaattctgttaacttagaaacaggaggtaatacagctgctcctggtttttctgggtcaactaagccacttaaagcatgagcagctgcagcaagcatattatcatttaacactttagcttcagcagccaaggcgccaaaaccaactccaggataaattaacgcattgttagcttgcccaatttgataaacggttccattatactcgatatctttaaccggaattcccgtcgcaattaatgcctttccatcagtccatttgagaaggtcggctgcttttgcctctgctaacttagttgggttagagagtgggaagataacaggccgtagagtatgggctgccatttcctttacaaccgcttcatcaaaacttcctggctgagtggacgtaccaatcattactgttggatgaacagccttaacaactgcaagtaaattagttaattcatcagcattagcaaattcgcttcgttgacgggtaaatggcttttgctttggtgttaagccgggcgtatcgtcaaacaataatccttgcttgtcaacaaggtagaagtgcttctttgcttcttcgggtgtcaggccttgacggatcaattcgtcataaagcatcttagcgattcccattccagcagtacccgcaccaaatgttaagaatgtttgatccgttaacttttcttttgagatattcatggctcctagcacaccagctaaggcaataattccggttccttgaatatcatcattaaaggtcaaaattttatcctggtacttatcaagaatccgtgcagccgttccccgaccaaaatcttcaaagtgtaataaactcttagggaacaatccttcaactgcatcaacaaacttatcgatgaagtcaaagtaaggttgtccttcaacccgcttcatccgattgccaagatagtgcggatccttaagtaatttttcattattcgtcccagcatcaatagaaaccgggagcacttgggatggatcaatcccagccgctgctgtgtaaaccattaatttcccaacagaaatgtcaaccccatttacaccccagtcaccaataccaaggattccttcagcatctgtaacaacgataaggcgaatatcacgaccatcagcggcatcagcaagttcctctttaattaagtcaggatgctcaatgctcaaatatgcagcatcttgcggcttaatgtaacgttcattatattgctcaatcgcctcagcaattacgggatcatacacaactggcataaattccgcaatatgtttttccattaagtagaagaaaagcgtacggttagtattgaatacttccatcaataggtgacgttgttcaatccgtgagttcttagattgatataaccggtagatttcgtctgcctgttcctcaatcgttcttacacaagatggtaacaagcctaataaaccatacttttttcgttcttcaattgtaaaagcagttcccttattcttaaagggatcatttaatatttgcattcctttacgcaacattatcgcctatcctttaccttttttctgtttcaacattcttagagtaattccagcgctagtttatagtcaaatatatgctatgatataaataaaattgataataccccttataatcactgatagagaggcatttactatgaaattaaacggcctaaaatattatcaagcactggtaaaatataaaaatttttcgcaagttgcagcaaaattcaatgtcagtcaacctactattacaatggctatccaacgactagaaaaagattttgggacgtcattttttgttcgtgaccatgtccataaacaattgcatatcacgccgactggtaagcaattcgccattcacgttgacgttattttaaacgaattaaagattgctcaccaagaaatcaatcaagctgaatcatccagtattcgctttgggctgccacctattatcggcaattactactttccgccattaaccccgctattaatgcgagaaggccttttaagccacttggaaacctctgagcatggttctaaggaaattctcaagatgcttaaacacggtcaccttgatttggcattgcttggatcgcttaaccccctaaaggaagtggggctaaaaactactgaactggctgagtatccctttaagattattgttagcaagcgtcatcccctcgctgctaaaaaggagattgattttgctacgcttaaaaatgaacgctttattgttcctgatactgaattctttcatgagcaagcttttaagcaaatttctcatttagctcattttcgtccccaagtcatctaccgaaccgctgacattcacgttatcaaaaccatggttgcagaaaatcttggaattgcttatttaacaagtttggcgattaccccagaagataatatccattccataaatgttactagcccgttaaaacaatcgttccgtctgtcagctgttactcgttcaactgaattattaacagctcccaagcaaaaactatgggatctcttaactacaaaaaaggaatgacaaataaccgtctaatacggtggctatttgtcattcctttttattatttctctttttcaatcttaattgtcttaataataacgtctttttcaggcttatccatcgcatctcgcttaactttgctgatcttttcgacaacatccattccggataatacttggccaaatacggtgtgatggaagtcaagccacggtgtaccaccatgtttttcgtaataatcaataatctcctgcgggtatccaacagccttcatttgatcaatcatattttctggaacatgttcattagtgacaataaagaattgactgccatttgtgttcggaccagcattagccattgacagagcaccagtgaagttaaataattcttcagaaaattcgtcttcaaatgggtgaccataaatactttcgccaccacgtccggttccagttgggtcaccaccttgaatcataaaatcaggaataacccggtgaaaaattacatcgtcataataatttttctctgctaatttaacaaagttttcaaccgttttaggtgcgtactttggaaaaagttgggccgtaattgttcccattgtagtttcaattactgcttttggtcctttaacctcatccaatgataattggggatatttcataaaaaagcctcctcttttctcttctaaacctctctaactatcttagcaggaatatgaaggaaaagacaattattagtcctcactaacacgtaatacacaagctcccttaatatcgccatgtttaacatagcgtaatgcttcatcagcctttgctagtggatattcgtgtacttcaggatggatattgagacggtcagctaatgttaagaattcttccccatcacgacgggtattgctctcaacactcgttaatgtcttttcgtggaatatttctttttggtaattcatcattggaatatcagtcatatgaatgccagctaaggccaaagtcccgcctggaactagactagctaaggccggtaataccatatcaccaactggcgcaaagatgattgacgaatccaaaggaaccggcgcagggtcataggatccttgaacagaagcacaacccaattccagggcgaatttctttgcatcctcaccacgcgtaaagacatgcacttcaattccctgtgcaagtgcaatctgggccgtaatgtgcgctgagccaccaaagccatatagccctaggcggccaccagcgggaacattggcacgttcaaaagcccgataaccaataatccctgcacataataatggagctgcctctagggaatcaaacttttccggaagccgatatgaaaatccttctggaaccgtgacatattctgcataaccaccatcatgatcccaaccggtataaagtgaatgaggacagagattctcatgacccgagcgacaaaacttgcataccccacaagcatgccggaaccatggaatcccaattcgctccccaagcttaaatcgttgtgtttctggtccaaaaccgacaactttaccaacaatctcatgaccaggagtaacgtgttcgtggtgaaccggcaaatctccttctgtcacatgcaagtctgtatgacataccccacacgttaataccttaacaaggacttctccccgtttaggagtcggcacgggcttttcggtaaattcaattggtgatttcttaccatcaatcggcccaggagttgtgactgcccaagccttcattgttttcggaatagcattttcgcgtttttccatccttaaagacctcgattaaatatatatttcattctttattgtagtgctttttattcataagagtgccgtattttttcaatttgacgagaccattgatccttaaattttggaatgtttaacggagcattgatagctggatcatcctttgctgcttgagttaacccttctactcctccgatatcatccaagattccatttccaaaaccactaacaatttggggactgatatgagccggcaatcgtttaggctttacctcctcaaatctaattttaaagttccacatatcgccaaagtcatatattaggtcatattcatggtcaagattacaatcgcctacccaactttgggtaatatcttttgattgaccaaagccactatcaagaatcggcaactgatagtgagtatttccttgatgcagttcaaataagtgatgcccgtccgcgttaaagactgctaagcttgcaaagcacaacatatccaggcgcatatcaccgctgacggtaaatcgccgccacattttaggatgataatcacttagctcaacataaatagtatattgtttattaacatattggattgcatgctcgcgttgatttcttacttgccgctgcatatcacgaattatacgttgtaggtggtacatccgctgtttagaaccaagatcttttagcctctgactaattgcttgaacaaacaaatcgtagtcctcactagagaaaagatcttctgcccgtaaaaactttccaaattcgcgaaaggcatcacttttagaatgaaagccggtatcagtcggacgatcattatgtagtttttcatagttaattaaatagtgatagaccaaggtaatatcgtcaagaacagattcaccgagtgcctcacagtagccgatataatctgcagcacaatctaaatcttgatcaacgatgctctcgctctttccacgactttctaaataatcttgataatcatctaaaatcttttctccgaccgccgttgcattcatgatatcgttaattgaaagtgagcggtaaagatagcgacggttatgttcattaagtttagggtgagtaggcaccttaaagtccgtaactgaatagtcttcaaaaatatccattacaacatattcttcatccgttgtcttattggtaatacgtgtctgttccgctaattgaagcgcaatttcagcattggtcgggtctttttcccaatcaataattgaattaggccccatcatgaggttctgatacatctgcaattgctgttgagttactggctgaatttggcgtgtaaatactactttgctaaattgggcgtcacgaatcatcctaatttttgcatgaggaattggcgaaacttctaataaacttaagaattcacgcttaaataccgcaataaaagatcgtgagtcattaaagcgttgaggatagcgtacaataattggcaacgacattaagttattcataataatcatgaattcaccagtaacacgaattgtccaaacatttgtctctaatagatcagatggtgcaatcacctgtgaattaatatgcaaatgttgggcaagtgaatttcccactgcaataatcaccctatcaactcctcctataatttcgattatattaattttattttgaaaagcattatttatcaacttaatcaaaccatatttactgaaaattataggcagaaagcctgtgactttagtcatgggatgaatgccttccaaagcagccatgagactgctttttcttactaaaaagtctataaaatctcgtttctgcccctgcaaatttagtaatattaaagtataaaggaggtgaaaacatgaccacagttttgaaagggatcaagcttcgcttgtatcccaacaagcaacaacaagctcaactatgtcaaatgtttggcaatgaccgctttgtttggaaccagatgcttgatatggcaaaacaacgttatcaaaacaatcctagtagccagtttgttgatcaatatggcatggatgtattgttgaaacctttgaagcaggaatatccatttctaaaacgtagtgattctaccagtctccaagttgttaatcataacttatatcaggcctttcaaagattatttaagcatctgggtggttacccacgctttaaatccagacggtctgctaagcagtcctatactggtaaaagcaaaattcaaatagtggcgaaccgctatttgagattacccaaaattggctatattaaaaccagcaaaactcgccagttaactcattgtaagatcaaacgctatacggttagttacgatccgtcaggtcgttattacctgtcactacaggttgaaaccacagtacagccactatcgaagactagtcaacaggtcggcattgacgttggcgtaactaatttagctattactagtgacggccataagtatgctaaatttgacgctgtctggttaactcaacaggcgcaacattggcagtctaagtatagtcgccgccgtcatcaagccacggtgagtgtccgtcaatggaaccataaccatcaggacgtcaaagaggaactgaatgactaccagaactggcaacgggcccgaattcagaaagctcgctatcaacgacgagtcgctgatcagcggcgtgattacctgcataagctgacgatggcattggttacgcaatacgatgtgattgtcattgaagatttgaaagtcaagaatctgcaaaagaatcatcatcttgccgcggccattgccaacgctagttggcatcaattccgtaccatgctgggatacaagtgtgactggtatggtaaacagctcattactgtcaagcccaactataccagtcaaatctgtagtcattgtgactaccatagtgggtccaaaccgctcgtaattcgtgaatggacgtgtccaaagtgtggggcccatcacgatcgggatattaatgcggcagttaatattctgcataaagggttaaaagccgttggctagggactagccgtggtaaaagaacgaaattctgtaagttaggtatttggaataccaatgtaacagcctaaatactacttcgcgttcccagaaaccgccgactttagtcggtgtgtagttcataaataaaatagaagatttaaaataagacataagtattgtctctgaaaggatgcgcaacttttgatcaatcaaaatctcgatatctttgacttacgaaaaattcaaatcaataaaactaaagctgaattggaaaataatggtaaacggcagcaaaaagaagtctctagtgacatgttaggaaccttcatgccagttgatcgcgaccccgtcaagataatccagatcactgaagctaacatgatccccgagttgcttccattgcgccaccaaagaatgcttgccagtcgcttttcatttttccgtggcaccgctgaattaatggaacatgaccttaaaagacaagcccaaagcaatcttcccataattatctgtggggatgctcatgtaaacaattttggcttttacgcctcccctgaacgcaagcttctctttggccttaatgactttgatgaagcccgaatcggaaattgggaaagtgatttaaaacggttattagttagtgctgaactagcgggcgaagagaacggttttgatcgcaatgacctttaccacctccttcaattaacgactaagacctaccgccatactatcaaaagcgctaataagatgagcctttcccaactgttttatttttcatttgcctatgaagacatggggaaagcgattgagtcttttggtgatatttcaacgcaaatgcaaacagtccttaataaggttcttaaaaagagtcagcgtagcaattcagaagaaataatccaaaaaatggcaactatcaatagtcaagggcaccttgtttttcgggataacccaccacgtgcacgccatcttagcgccgtgcgttatcaacagattgttaaaggatacaataaatattgcgaaaatgttcgtcaagatgttcgggttcttctcgcaaactttcacatttccgatattatccgctatagtgtcggggttggcagttttggaacacgatgttacttaatcatgcttactggcaatgataatagtcatattgttttacaagttaaagaagctatgccattgcgttataatttactttccctccccgtacaacaagtaattagaaatgggggaatcgctggtcaaagaattgtaacagcacaacgggttctccaatcctcatccgatcgttttttaggaagtacaacttttggtggccgtagttattacattcgacagttccgggatatgaaagaatcaattaatgttaataaacttgactttgaaagttttcaattctactgccagacgtgcgcttatttgctagcgatggctcattttcaaagccccaccgcaccaatgatccgtggttatttaaagcatcagaagatattagatactcttttaccaaattgggctttaaagtatgtcgatcaagtcacagcagactatggacaattcaaattggcaatcgctaaaggaaaattaataaattaattataattaaaaaggacttgcattcatcgttttgcaagtccttctttaatactatttttcagacttttttcgctgatcacttccataacggtcttgttccttgattacactacttttacggcgatgcttattaataaaatcttgctcagcagcgaaaatcattaaaaagtcaataaaatttttactaaaattctttttaaatttgtcccatctatttttgatcattttatatacctcataaatatcattcatctttacttttattcattctagcatatctatttttgtgcaaacgattgtgtaattttaaaataaaattgtggtaaaatagaatttgtaaaagcgcttacttcaaggaggaaatattttatggaaatatctaaagtaccatttggaacctacaaagacgatccagtaacaaaatacattttaacgaacgataatggtgttcaagtaggaattcttgattttgccggtttacttcaatcttttaaggttccaacaaaagatggtggtaaggccgatatgattttgacctctgaaaacctcgacgaatttactaataatggcttttgtactaaccgcttaatcggccgggttgctggacgaattgcagatggtaagttcagtattaacggtaaagattaccaaattgaacaaaatgaaggtaaaaatgctcttcatggtggaactaatggtttttatagtcacatttggcatgttgatagcacgaaagcaactgatgattctgtttccatcactcttagtttaaccttaagtcctgaagttgatacataccctggtaagatgcatgtcactgcaacctataccttaactaatgacgacttcctttcacttaagatgtcggctacttctgatgcagatacgttgttcaaccctaccaaccacacatactggaatatggcagcagcaaatgttccaacggtggatcaattaaagctttatgtcaactccgaaaatcacttagccgttgatgatggcaagattccaaccggtgaaaaaatcgctaacgaaggaacaccatttgactttagtaccccaactacaatgggcgatgcattagaaaaaatgagttcaactaaggaaaatggctttgatgatatttgggaagttactcctagtctcacaaaaccagttgccacacttgaagatccagaaagtggtcggaagatgagtctttactccgatcgtaacggattagttatgtatacgatgaactcagatgatgcagcggtttacaatcacggacaagttcatccccatcttggtttagcaatggaagcgcagaatctttcagatgcgcctcaccatccagaatttggtgatattactttacatccgggagaagaaaaaacatacaccattaaatggcacgttgaatactaattaattactacgcaaaatgcatcgagtaggagataattgattagttcaattatcgacctctcacaccaccgtacgtacggttccgtatacggcggttcgacaacttaatcacattgaattgactggagcgtcttggacatattcataagtccgagttgttccagttttctattagttagagaatagctcaaggtcttactgtgtgcagttcgccagtagcccttgcgggtactagcgaagacatatgcatcacgctgggacagccccagcttctgtaagttagttaccttagttttaagcttcttccattgcttccagatatactgtcttattcggaccctcaaccacttgtcaaggcgttgaataaagtcagttagtttcccaattgagtagtactgaagccatccacgcatttttcgctgaatttcttcaaacattcttgtcagggatattccacgattacgtttagttaataacctcaatgctttctttactcgttgttgcgattgtttagctggacgggcgtaggctccattgtggtctacacccaacgaaaagccaagaaactttaaccgtagcgggctaccgactttggttttatctgggttcactttaactttcaatcgcttttcaagaaactgggtaatgcttcgcattactcgttctccggctcgttgacttttaacataaatgttacaatcatccgcatagcgcacaaagtggtgaccacgtctagtcaactctttgtccaactcatttagatagatgttcgccagtagtggtgacaatggccctccttgtggggttccttttccactcttagcgaaaagcccatggtctaagactccgctagttagaaacttacgaatgagtcttagtgtccatgggtcatcaatatattgttggagatacttaatcatcaagtcatgattaacgttatcaaaataggcttttaggtctaagtcgacaactcttcgataaccttgattataaagatctactacttttgcaatagcgtcgtgagccccacggtgagggcggaagccaaaactattatcagagaaaacacgctcaaagataggtgtaagaatttgggccacagcttgttgaaccattcggtccaccactgttggtattccgagttttcttactccaccattaggcttcggaatttctacccgtttgactggtgctggtttatacttgccctcacgcaaactagcgatcaactccgtcttattttctctgagatatggcagaaggtcattgactgtcatatcgtcaatgcctgctgcccctttatttctcttaactcgcaaataagcctgattaaggttattgcggtccaagactaagtcttggatagtgacactcatacctttaccttcaccataatcggtactacgcgcccttgtgtactttcggttttccaaacctatcctcgacaagcggtcagcttgttgttctgttttctgcgattgtcgcacctgattacacctccgatataagttacaagttattgtcgttcagtccttcatctgattactcagactactatgacctcggctgacttctggcttactcaacgctacatcactgcaccgcttgtttctgtggaaattaaacttattcctcttgtcggaaacgtgtaggccagatctccccgggtaaggatattaactttcgtaccatgtcaccggtagctttactgaaagtaacttcgagtagtgttggactttaacttgtcatgcagtcttatccagttagttccagccttatagctacttcttgttcatcggtgcagtactttgccttagacttccttcagattccacctcacagtggacacccttgtcctcagctcatggttccgactactacggcccatagcggactctcaccgcctagctgatacccatgccgggcgcacataaaaaagagatcgacaaattgtcgatctctttttgtgtgttaggaattataaattaatttttgtcatctaggttatacttcccagcattttgaagatttcctttgccttttcaaggtagtggtgttctgcacagaataccttgatcttgccaccttgatcatcggtaagagctgctagcttttcatcaagttccttaaattccttattaaggtccttaataacgccttcttcatcttccatgtaaacatagtgattttctgctggatctttacgaccttcactagcacgttcttcaagctttactgagtccttatctactttccaagcatgcttaaggattgacttaatatccttaattgtttcgtgttgagcagtacggtgcttctcattgtcaacactatcttcaatctttattaagtgtccttcagcatctgcaatcttctttgcaatacgatccaaagccttaagttgacgttttgcgtaatcagccataaataattacctcctaatataatagctataattcctaattcacttttattatatttttataatttaaattataaaaataacgcgtcttaaaattatagttaattttattatgaggtaatttcagcgcctaaataaatagatgattgatagaaattctcctattcaatcatctatttattaaaaaaacatcgactttttagcaacgctttggcttgtacttactggaatattaaaatcaggcagtcctggaatatgcaactcaattgagccaacttgttgattcttctttatcggtgcagttagttgtttttgatcatctccctgcactcgtaatgttggtttagttgcttgtaatttcatattctttggaagccaaacggtagtcttctttgttagcttaatattagccttattcttatttttatcattctttacttttacactagtaagcttggccgaaagatcacttacttttttgatttcaactggctggtactcatcgactaatttattataaaagtcttgttgcatcttcgactggtcattccattccccttttgtatgcaaggcaactaaaataatccggcgtcctgcaaaggttcctgttgacacaatacatttacccgcgcgatcagtatttccagtctttaagccgtcaatttccccatccttaggagcaaaaccgttttgtggcaaaagagcattcacatttgtcattaaatattgttgatctttagttacatcaaagttagcaaacttttgctttgtaatgtcgagagtttcaggataattttcaacaagatactttgagataagcgcaacatctttagcagataataagttctctgcgtctttatctacgcccttaagtttatgctttcctaagtccccgttaggcagcccgatcatattgtagatttttatatctgtaactcctgcctttttcgcaaatgccatcatctttttattaaaggctgctgtactgcccgcgtcagctaatgccaatgcttctgtacttccatcagcagatacgagcatcatcgaatcaactaactgacggactgtgtattcttccccattcattaatgggacatttgaaaagtgccaatcatccgccatcttggcaactgctggtgtaatcttaatcttttgatcccattttaaatgatggtttcgaatatcttgtaaaattactcctaaagttaagattttaattacagatgcaattggatagcgtttagttgcatttttttggtatagaacctggccactttctgcatcaatcgcataagctgctcgtgcatccatctgaaaagctgcagtatcagcatggactttttcgaacatccccaagccatttaaacagatactaattattgccgttattaataataatttggcaaaaaaagatttaacctttttcattataacaatttctctcctttacacatttaactatcatatcctattctgcctaaaaaaggtgtaacgatttggtaacaattcaaatgaaatccttatttttcattaaattaagaagatgcaccttttaacttctataaattatctgtattattaataagtatgctaattttaatcagaaagggtcggttaaaaaatgcaaagatcgcaacgtcatcgtcgtaaaccgcgcagacttatcttaattatcatcgctattctgctcattattatgggtgtccggcacttcagctcgacaagtgcccgcctaaaatccgcatggaataaaatcattttcacttccaataataatgttagtattgcggtatactcaccaaagacccaccaaatttatacttctagtaatgtaccccagcataagtttcgaactgctagtacagtaaaggttagtattctagcgggaattcttgctaagcaacaaagtcctcttacaagtcatcagaaatcgcttgctactaaaatgattgaacaaagtgacaatgattcaactagcgaattatttgaagattatcttggcggaaaaaacggtctccaacaaacttttgaaaaatttggcatgacccaatctcaggctaatagcagttgggggttaactgttactactccaaaagatcaagttaaactattaaataatattttctataagtctaaagttttatctgatgacgaaagaagtgaaattcgtgatttaatgggtaatgttgaaagtgatcaagcgtgggggatctcagcaagtagcgataattttgcattaaaaaatggttggctaaattacggtaaagatgaatggatcgtcaatagtattggctacgtaaaaaatagtaacggaacagactacacaattgcagtttatacggataaaaatcaatcaatggccgcgggacaacaagcaattgaacaacttgctcgtgtaacaaagccaatattagactaaattgaaatgataaacaaaataggggctggaagaaaacttcaaattttcttccagccccatttttataggtagtttattgagagagataaagcgttttggaaaggaatactacctattttattttgagagagattactaattaatttgatgtctatttttgttccatcactttttcaccattagctgtaatagtgaaagtcttgttagcagcatcagcatcaagaacagccacattcttgccatccttatctttccgcgtaaccttgatagttgtttcagttggtgtttccacttcaattgaaccatcaagatcaaaggctgcaaatttattccgccatgcaagtaagtctaagagattcttaactactggacgttgaacttcttgtgcaacttcttctttagtgtagtagtgacggttgatgttccgaccttccttagtcttttcaagtaattcaaggtcatttgaaccagcaagtaaaccaacatagtaaaccattggaataccaggtgcaaatacttggaatgcacgagaaagcaagtaagctttgtcatcgtcacctaatgcagagtagtaagtagagttaatttggtaaatatccaagttgttgtattcagcacttgagtatttccgcttaacgttagcaccaaccttgtataattcattggatgcatattcgatttcatcatcagttaagatatccttagcatcaacaaccccaataccatcatgagtatcaagagtagtaaattgcttcattggtgacatctttaaccacttagcaaggcggttagtcttaccagagtaaagggtataaagagtagtcattggtaaggtaaagtcatagatgaagaagtcatgttgtgaaatcttttgtggaatggtgtagtgttcgtgaatttcgggaaggatgatggccttgtaaggagccaaaatatcttgaacttcatttaagagatcccagatttcaggttcaacgaagaaatcattagtaccaaccttcttaatagcgtaagcaaaggcatcaagacgaatcatatctgcaccgtgcttaaccatgtcaattaatgtttccttgaagaattcgttagctaccttactcttaacattaatatcaatttgttcttcaccgaaagtgttccataagttttcagtagtaccatcatcaaaggtaatttcttgcttaggagccttatcctttcgcttgtaaattaaatcaacatcttcttgagttggacggttcttaccagctttttcccagaacttttcccaacgaataaagaagtcgttgtacttagaatcatcgtgcttcttcttgaagtcttggtacatttcagacttcttggaaatatggttaatcatgaagtcaaacattaagtagtagtcttcacctaatgcttcaacatcatcccagttaccaaaagcagaatcaacaacatcgtaacggtatggtgcaaaaccacggtcaccagttgatgggaagaatggaagtaagtgaacaccgccgattgcatcaccgatatagttctttaatacttcatgagtttctttaatatttttacccattgagtcagagtaagtaattaacattgcttcatttttgattggcataatgatatcctccaataattttaaatttagttagcttgtttagaatgacgagttgcaaagaaaataattaaggcaataactattagcattaccccgtagattgggaatggtgcggcaagatcaaggccactcattgggcgaccgactaatcgattcatccattcagcaattgttggtgagaagaaagctccaaagttaaaaccaatcagtaccattgaagttactaatggttgacgcttagcaggagctaaatccggtaacaagttaaaaatcaacggagaaactaattgtagtgggaagccgattaaaagcaaaccaattactaacattgcaaagttgccgtttgcgaaggcaaataagaagtttgaaatggccattaacccgagaccaaggtaaacagtgttaaaacctaacgctttattaattgatccgtagaataaaccaccaagcgttgccccaattaacattaaggaaagaaacattgatgaaccagtatagctacttcctttaattgcaacggttaagccagggaaacgattttccattccaacataatctacaaccaagaggaaggcaaagagaacaaggaggtaaactactggactaatctttttaattggttcttccacttcagttaattcttcagcaagatcgtcttctgcaacgttattatcttgtgctttgctatcgtcaggaacacgaactgcaaagaagaaaagaacaacgaaagcaagaagataaacggcaaatgatgcatgccaacctgcataactaagaattaatccggcaattgcaagggtacaagcttgaccgatttgttcagccgcagcacgccaaccaagcatttgagctcgggttgtaccttcataccaaactgaaatcatcgaaattgcttgagagttatataaaccaaatcctgctcctaaaactaaccgggaaatcaaaatcgcagtgtagtcattcgcaaatataggaacaattccggcaagaccaacaattgtaaccccggccataataatctttttatcagaaatattgaaccattgttgaagtaatggtgaaaggacaacaaaaatcattacagcaaatgatggagttgtaactaaatattctgactgtgtctgtgagattccgagtgccgcctttaattgcggtaaagaaccttgaatggcataagcactcgtaaccatgaacgaaactgacaggaatgccaatttggtaacaagagaatttttgttattcataattagtagatactctttctataggtatttgacaaacgtttatcatttctgtacatcaataatatacaatgaacttttcaaaatgtcaaacgtttaacaaagatttattacaaaaaattgtaatcaattacattgttattataacgcgctttaaatgaaaatagatgaaaacggatgagaacgctattttagctcttttttgaacaacttgtgaacaactatacattatatttttataatttttttattaaaaaagagtaaagcaatgactaattcatcgttttactcttttttacttaatccacacaaagcttcttgattgcctgcgcatagatttccatcgctttatacatgtctggcaatggccactgttcattagcttgatgcatataatcgggagttgttggtaacattccgccaaaggcaacacaattattcatggttcgagcaaatgttgccccaccagaaatttgtggttcagcatcaacatccccagtttgttctttataaactttcatcaaagtttgcactaatttactgtcttttggaacgtacagaggggctaaataatcaaaatgaacatacttcaaatcataagctgccacctgtttacttagttttgctagtaaattatcgcgatcgatcgttacgggaatccgtaaatcaatctgcattcttgtttcattttcattaatctcaagactagaaatattgaaagttaattgtccagactcatcgcgaacatcaccgagaacattgctccccgttgcatcttccttaaataatttgccaataaaatcaagtggcttaaaatcaaaaacatcatcaagcgcaatcactaaccgtaaaacagcattcgttccttccggtgccatcatcgcatgaacagacttgccaataacagtaattgaattaccgtcacttgtatattcaaagccatgcttatctaaagccgccttcacttcatcctgctttggaccatcgtacactgcactatcagggaccgcattaaacgcatttttcaagttaatctttagttgatctgttcctggaccaacgagataagattgttgcaaccccttttcagcataaattaatggaaattcagcatcaggagaaattccactatcaattggcgcttcctttttattatattcagcaattccacgccatagaatttcttcatcagttccataaataaaacgaattcgttgattgaagtgataaccttgatccatcaatgctttaacagcatataaagctgcaattcctggacctttatcatcttgtgaccctcgtccataaactgcatcattgattactgtgcctttaaatggatcatgtttccatttgcctaaatcgccggcaggaaccgtatcaagatgacaaattacaccaaaaattttgtccccactaccaacttctgcatagccatagtacccgtctggatcttcataggtcttaaaacctaattcatcacaaatcttcatcatttcatcgagggcgttacgaattcctttgccaaatggtgcgccttcttctgctggttgattatatgatggaacagaaattagtcgttctaaagttttaacagcagctttttgttcatcttctgtaataattttatccattcaaatcccctcctagagcaaggcagcaattcctaagaacaagcaagtagcaacaaagagataaatcattaatttcagcatccacttccaccaaatgccgacattaatatgcgcaattgctaatgctcccataacaactcccgaagttggggtaataaggttaacccaacctgaagctgcttgataagcagtaataacaaggctaccagaaacatgcgcaaaatgtcccattggtccgataattcccatcgttgccgcagctaacccagacgttgatggaattaagaatgacattgggatatagaaaatgtaagtcaaaataataaagatcgtttgtgataatccatgaaggcccaattctccccagtgaagaactgttccagtgatcatcccattattcattattacttgaattccccgtgcaactgccacaataattgcaacgcttaagaaatctcccattcctgacatgaaagcatcaataaattcactttccttcatatggtaaacagccataatcaagaccgacataaagaggaagagcatggtaatttcattgaagtaccatgttccaagaggtgccatatcatgccctaataaatcgcctaggaatggaatattaaccaaccactttgtaaatttatcaaaaaatgtccaatggctattaaggtttgaccatggaattagtcctagaatcatcacaacaaaagtaattccgaatagccaaataactgtcttttgacgaccggtcattttatggtcgtcattaggatcagccttgactaaaaagtgcttttcatcttctgctcgttgattgtaaactaatgatttagttggatctttttcaattaccgatgcatagtggtaaacataaataatactaatcgttatcgtaataattaaaaggattacccgggaaactaaaccatcaccaggagaaatatttaacgtttgagaagctactcctgtggcaaacgggttaacagttgatgctaaacaaccaacttgacttcccactaaagcaatcgcaaccgctacaattgaatcaaagccaacacccatcatcacggggatcaagagaggagaggatagaatgcaatcgtttcttcccccattccatatgttgatccaccaagagcaaacagaagcattaaaattggaatcaattgtttttctcgtcccttataccggcgaacgattgaaccgatcccttcgtttaatgcatttgtcttattaaccactcctaggaatccaccgataacaagaataaatagtgatactgagatagctccatctgtctttttatcaccgaccatcccgataacgggtgccataaagatatcccaaattccctggggtttatttgtcaccgccttatatgtgccagaaataatatttccagctttatccgtctcatatgtccctgctggtataatccacgttaaaattgcaattaaaataataattaaaaataaaattgtaaacgcagagggcatatgaaaatgatgttttttcttcgtttgtgtttcctgcacaataaccgcctcttttgtaaaattagtatcaattttattttaattcagtttgaaagcggcttcaacttaatctaagaattatccttaaagaatgctataattgccttgtagtaattttaaggaggatgaagctaatggtaatgaatcctaataaagcacaagacgtttggaaagacgccggtgaacatgtccaatttactgtattagaattaaaacgagaaaatcaagcaaaggaacaagaagcaattcaagaatttgttgaacggttccaagcaattactcgatcactgcgaattcgggataataagggtaatcttaaagtttctttaggctttagcaacgacgcatgggactatcttttcccaaatgcccctaaacccaaagaattagaaacttaccaaacattaaccgggccaaaatacaaaatgcctgccgcaaaaggagatattttcctccatattcgtgcaaacgatgaggctgcagtttacgaattcatggctcaagtaatgctctttattagagatattactaatgttgttgatgaaacaaagggctttcgctattttgaaggccgggccattattggctttattgatggaactgaaaatccggaacctcaggatgctgctgaatacgcaattattggtgatgaggatcctacgtttgaaaatggttcatatgcctttgcacaaaaatggcggcataacatggacatttggaataagctaactactgaaacgcaagaaaaagctgttggacgaaagaagttttctgacttagaattaagcgaaaaagagaagtttaagaatgctcataatgtcgcttcccaagcggaaattgatggtattgaacagaagattgtacgcatgaatgttccatattcagaccctgccgctgataatactggaactttctttattggttattcacggcattggactgtaactaagaagatgcttgaaaatatgcttgagcaaaacgattatctcctaactttctctgatattttaggtggtcaactcttctttattccttcgcgtccaatgttggatcaaattgctgaaggcgaattaaattagttgattgacaagttgaaggcaaattgctatattattagcagcaaattttaggagggatcatccattgaaattttaattctacacaatttaatgtatctggaactgtggattcacgcagaaaggtactacgggtagaattatttttcaatgattgatcaataaatgagaactaatgggccaataccattagtttaaaagtctacctgtagtggtgggctttttttcgttaccttttctgcgagtaacgaaagggtgattttttaatggaaccaatcacgataaataatttaacttttgcttatccgggacaagaaccgctttttaatcattgtgatcttaatattagcagcgattggaaacttggtcttcttggacgaaacggtcggggcaaaaccacactactcaaaatcttgcaaaagcaactttcctttcaaggaagtattcaaaccaatcttaagtttaactattatccattagtaattcgtgaaccgaatgattacacaatgaatgtccttatgagaagtggctatcaaggtgagcaatggcaaatcgaacgagaattaaatttgatggcaactcccacagaattactatggcaacctttcagtagtcttagtggtggcgaacaaacacatgtgatgctagcaaccctttttgcccaggatggatatttccccctgcttgacgaaccgactaatcaccttgatcaggatggtcgaaaacaaattgctcaatatctaaaagcgaaaaaaaacggcttcattatcactagccatgaccgagattttctcgataaagtcattgaccattcattagtgattgaacaacaccagcttgttttaacccgtggtaattacagtgattatttcgttcataaggagcaacgagattctacggccatcaagaaaaacgaaaatttattaaaagatattcatcatttaaagcaaacacgtcaggcaaaatctcaatgggctcaacaagcagaaaatgaaaagaagaataattctcatgcggataaaggctttattggtgccaaagctgcaaaaatgatgaaaaaagcaaccataatgaaaggacgcttagacaccgcaatcgaggaacgaaaaggacttttaaaagagattgaaaatgttgttccgctaacaattaatgtcctccccactaatcatcaactattgttaagcattaatgatctaacgttatcgtatccaactaaacaactctgttctaatatcactgcaaccattgaaaaaaatgagcaggtcctgctctgtgggaataatggtactggaaaatctagtattattaatgcaatcatcgggacattcagtggtaagcaaagcggagatatactttttagcagtgcccttaaaatcagcacagtacgtcaagattattctgataatcatggaagtttacgtagttttgcatcttcttctaaaattaactacgatcaatttcttaaccttcttcgtaaattagggatggaacgtgctacttttaatgttccgattgaagaaatgagtatgggacaacaaaagaaggttgaactagcacggtcattagctgagcccgctcacctttatttatgggatgagccgctaaattatcttgatacctataatcagcaacaactaattcagttaattcaagaaaagcgaccaccaatgctaattgttgaacatgatcaaaatttcattaagcaaactgccacaaagaaaattgaaatttaatatttcctgggaaataatcaaatttaccaacttaatgtaaaaaaggagctgtgacacaagttaggtcacttccacaaaatacgaacagcgcagtacaacaatggccttcatcgtccggcaaagtcgaacgttgaaggcctattgttgcttgcgggggctcgaaaacgaagtcacgagtgacttctgtctcgctcccataatttttagctaaattaaattcaattcagttaaccactcaagaaatagtgggaaccactttcccatatgattatctacccgatcattattgacaataccagtatattcgttagctaatgcgattccatgtcccccagtgccaaactcatgtaattcatatggaacatcatacttgattaacgcatctgcatatacttggaggtgatcaacaaagggagttaattcatcttttgccgatccccacataaaggttggtggtgtttgtggatttaccaattccgctacattttctgttgtaacccccatgcgttcatcaatcaagggttgaataacaggatatcctaatgcggcaaatttagcgtgtgttagtttttcgttactatatgcagcggcaatttggcctcctgcagaaaagccaataattcccagtcgatcaacgtcaacatctaattcatttgcatggttaacaatatattcaaatgcttggtgaactgctattttggcttcttcataatttttatgttcaactactggataccgcacaacaaatgtttgccatgcatgggttgcaaacgttaatgccacccgctcagaatctcgttccataatcttgttataactgcctcctggcaaaataacaaggccgggtaaagttttatcagtattactatgataaatatctagagacgaatatggttgatctaagttaacacttttaatttccattttctcacctcattttgattttgctaaatgttaaaattacaaataatagtataacctcaatatgcaataaacgatacaggtaaaaaattgttattaattcacaaatttccccttgtttatcatgatacatttgttaaagtgataaggtatcaattattatttgggggttagaaaatctaatgagtattatgaagactaagtcattctggattgctgctattatgaccttaatttgttctgttgctggggtgcttttagcaaaactaccttatgtcaacctgattggagcattggttattgctttattattaggtattgccatgcagttgactcctgctagcttgcggaatgaggctcaaggcggcatcggatttatttctaacaaatttttacggcttggtattattcttcttggtttccgcttaaacctagaaaaacttgctgccgctggggttaagactattttggttgcggctattggggttaccggaacgattgtcctcacttattggcttagtcgaaagtttggtgcagaagatgaattagctatcctttctgcttgtggctgtggtatttgtggagcggctgctgtaatgggggtttcaccacaaattgaaactgacaacgaggagcgcaaacgagaaaatgaagtattagctgttgccgttgtttgtgtaatggggacagtctttactttagttgaaattggaatcaaaccattactcggacttaccgatccacagtttggaattgtggctggtggttcattacatgaaattgctcatgccgttgcagccgggggagcttttggtgaagcaagtttagataacgcccttattatgaaactttcacgggttcttctcttagcgccagtcgctttaattgttggttactggtatcaacaccgccttatagttgaaagtgaagaagaacatactaaagaaccaaagaaattaccaattccttggttccttggtggttttattttaactagtgtgttaggaacctttcttccattctcaccagcctttcttgatgcacttgttcaagcagcctatatctttttaggaatggcaatggctgcattaggtgtttcagtaaactttaaggttatttttaaacgtggaggggccgtttttggcgcggctgtgattagctcaacctgtttattggtatttatgattattatgagtaaaatattcttctaagttattaaaagcgttaaattgaggatttattttagtggcatatagccattccgccaatttaacgctttttatttatattttttatttatattcttctatttaaccgtctttcccagctggtaagcttcttcaacatgtttagctagtttttgattattccaagaatcagctgcgagcacctctcctactttatcccaacgcatatattcaagcaattgcttaaaatataagttaagtgaagcaaaggcatctgcttgaccataaccacttactaaagtaatagctttctttccgccgtgaagttcatggttatagctgtagaaacgatcaatcactgcttttagcgctgcattgatcccgtaataatatagcgaactaaccaagactaccatatctgccgctaacagcttaggcattacttcattagtaataacatcattcggttcaatcgcaacttcttgtccgggatgattgtcctccaatttaatcatcgaaaattcatcggtccggcgtccagcatcaaagcgataaacttcatttcctgcttcagttgcgcccttaacaaaggcatctgctaattgctcagaagttcctggatgatggggacttcctgttaatacaataatcttcatcatgatcccgtcctttcttatttaattatagtgatagttcgactaaattagaaatagaaacattgaatattaatagataactaaaatgaattaacgaggccaactaaagattttcaaccaatttaacttagtacgctctcgtttttgttcttccttaatgtatgaacgatccgtaatgaaatgaaagatattcatgcctattcctcataaatatgttcactaaggtagcgctcgcttgaatcaggaaataccgtgactaaattagccccgtgtggcaattctttagcaacttctaaacttgccgcaagcgcagccccactagagctaccaataaagaggccgagatttttagcaacccagcgaacataatagaatgcatcctcatcactgattgtttttaccccggtataatctaagtccttgaaaaacggtggaataaactccactccaattccttctgtacggtgactatgggctggacccccatttaaaatcgatccggctggttcaacaatatagccttttaattctgggtaagcatcttggagcgccttttgaattcccgcaaaagtgccaccacttcctgcaccagctacaaaggccgccagcggtttattagcaagatcagctaaaatttccggtcccaaggtgcgttgataaacatcagcattcgctggattctggaattgtaaaggcacgtaagcatccccgatttcagcagctaattctttggcggccgcaattgctcctttgatcccttcttcactcggagtattaatcacttcggctcccaacgcacgcattaatgtttgcttttcaaaactaaacttttctggtaccactaatttaactggtaaatggtattttagtgctgctaaagcgactccaatccctgtatttccggcagttggctcgatgattgtcgttgtatcttttatttttccttcttccattcctcgctggattagcgccatccccaaacgatccttgatactgccacctgggttaaacatttcgagcttagcataaatattaacgtcattcggagtcttcatcggcaagtgcattaagggggtgtgaccaatcaaatcataagtattttcaactaacataatagttccttcttcctcagaaaagtaagtgggaattaacctcctcgacaaggcggtgggctaaggatagaacggtgattagcacggcacgggctgattatcgttcgaacttagcctcgagccttgtggttaatttccacgatatcgtaacaatatacctataaaaaacgaggctgttgaaaaaacaaaagttttttctcagcctcgccttatgtgttatcaacttgatagtaattcaattaaaaatgagtataccaaaaagtgagtcgcataagacgcgattcacaacaacaaatatttgcgttaacaaaataattgttttccattggtaatttcctcgtatttcaaattacagtaataataactagttaaaagtaagttgtcaagaaaatttacatagacaggtgtaaaataaaaaagaatcattttataaaacaggagcgctacacatgaaaaagaacggactattattagtcaatctcggttcacccgatacgccaacaactcccgacgttaagcgttatttgaaagaatttctcagcgatcggaatgttatcgaaatgccaccagcactatggcaaccactccttcgcggaattattcttccaactcggtcatggcgatcagcgactttttatcgtaattgttggacaaaagatgggtccccattgattgtctacacagaacggttggttgctaaggtccagaaattgatgccggagtggattgtcaaaatggcaatgacctatggcaagcctaaaattagtgacacaattgtcgaaatgaaaaaggaatgtcaaaatattacggttctccctctcttcccttttttcactaaaagcacaacccaaacgatcattgagaaggtaaaggatgctgatccagaagcgaaaataattgatcgtttctcggcagaagaagattatttagacttattggctaagcaaatccaaacggcatgggataaagggaaatatgacaaattactcatttcgtatcatggaattccgacagccatggttaatcatggtgatccttatcgtgatgaaacagaagcggccaccgcggaactgattaaacggctggacattcccgaaaagcaaattaagatggcttaccaatctaagtttggcccaatgccatggttaaaaccttacctccggaatacgctgcttaatgaggcacaactcggtcatcgtgatgtgttagtcgttgctccatcatttgtagcggactgtttagaaacattagaagaagatcaagtacaaaactatcaggtctttcgtgaaaacggcggaaataaccttgtaatggtgccttcgctcaatgactcaccagaatttgctcagtttattactgatcttgtgcaacgaaagggataaaaatggaacgaaaaagtttagacgaaatcaatgggagtgttgatgtaccaaatgtctatcaaagtgcattttggcagaaatttctcgcttatagtggtcccggtgctttagtcgccgttggttatatggatccaggtaattggttaacgtcgcttgccggtgggagccaatatcgctatcagctattagtggtcctttttactgccattttaatcgctatgtatatgcaatctttagcaatcaaactcggcgttaccacccgaaccgacctcgcccaagcaattgcgcggcgtttacctactcccctgcggattgccctgtggttatttaatgaaatagcgatgatggcaacggacttaaccggagtcgttggaactgctgtcgccttaaacatgttattcaagttgcccttacttatcggcgtcctgctaacaattgcggacgtgctagttgtcttatttttccttcattttgggatccgccgaattgaatttatcgttttaactgctattctggttgtcggcgccatctttgcgattgaagtctgtcgggcccaccctgaattttccgcgatcatggacggttttgttcctcgttccacaatttttactaatcacagtgagttgctaattagtttagggattgtcggcgccacgattatgccccataatatttatcttcattcctccctggcgcaaagtcgacgctacgatgaacatgatccagagcaagtcaaagaaacgctccgttttgctaattgggattcattaattcacctttttgcagccttcatcgtcaacgcccttctgcttgtactaggcggaaccctcttctttcatgcggcaagtctcggtagtcttgaggatgtctttttcgggctaaagaatccccatatcgttggtgctctagcaagcccattaatgagttggctctttgcctttgctcttttggtaactggtttaatctcctccatcactagtaccttggctggacaaattgtcatggaaggatttatcaatattcgcctcccactctggaaaaggcgtctccttactcgagccgtaacccttgtgccaatcctaattatcggcttcatgattaattttaacgaagagcaatttgagcaactcatcatttatgcgcaaatcgtcctcagtatcgccttgccatttacgctctatccccttgttgctttgacaggcaataagaaactgatgggaccacacgttaattcaccatggcaaaccgtccttggatatgttttggctagtttggttactgggttgaacttgttggtgttggtataatttttatttattataaatccaatagatagatacccttattttcaattatcagtgtttaaaaaactaatcaaatattgtaagataataataaattttgttgtaatttttgatgcaataaaagactggtcactatttacttttgggatagtaatttgatattaaaaatattttatctttggtgtgacgcttttatcaatctcattttacaactgaattaaagaagcagggctgaacgatatttatgttcaaaccctgcttctttattttagtttcgtcgtgcaatcatcacgcgctgtccacctatttgtttaactttaatgtctttaaaacgataatattccagtagttgacgatagcgttgtacagtagtagcagtaatcactatggttcccttaaaagcgaggacccttatcgcctcttgcaaaacacgtccttgcgtaattgccggttttacctgctgtaaattactaatcagaacatagtcaaactgatgatcagtgaaaggcaaattagtgttatcagtcaattctactttcgcgcgatcagctactgcctcttctttgatcagttctttcacttgctgtgcttgcttttcatttttaactattcccataattttgccgggagcagtcaattgcttggcaaggttagtaaacgtttttccattaccaatgctcatatcaaggatttgaacatccccgcgtatcgataaatcagcacttatctttttccagacctgttgcctttgccagatcaaccatccaataattccaacaactataacaattacgatcccaataacgactatcaattctcttcacccattattttaactaacaatatcgtttagcttccgaatatcctttaactgcccaacaactgtgattttatcgtgcggttgaataacatcattagcttgtggcatttgattaacttcatcatccttactaacaatgataatcacattgacattataacgattacgaaaattcagttcgtctaaggtcttattaaagaactttggattattaatatttacttctgccaaagttatttccttactcaaggtgacataatcaacgacgcttggatttagttgttgaaaaataagccgcttagctaaatcatgctctggacgaacaaccatatcagcgccaattcgttccaaaacgcgcgcatgattaacattttcagcccgacagattacatctggtgccccgagttctttagcaattagcgtggccatgatacttgcttcaacattttttccgattgaaatatacacatgatcaaaactaccgatatcaaggtcacacagagcatcctcatcttgcgcgtccgcaattaccgcccgcataactgaccccgcgaattcatttaccacttcttcactagaatcaatcgccaatacttcttgaccagcctgaactaaagcttcacatatcgaggccccaaattgcccaattccaataacagcataactttcttttttagccaattaacacactctcctctggataacgataattcttcgctgctgtacttgcatttaggattgagaacattacagtataaattcctacccggcccacaaacattaaaaacattataataaattgacctaataaattaaggtgggttgtaattcccaacgatattccagttgtcccaaaggctgccactgcctcaaaagtaacatacgccaacgaatcatgttttggcaaatcctgtgtttcaacaagcaacaaaattgatacaagcaaaataaataaagcaacaaatagtaatgtcaaagcacgataaatattttcttgggtaaaccggcgatgagcaaatgtcgtgtctcgctgcccacgcaaagttgcaaaactctgaatcgttaatagaccgattgttgtggttttaaccccaccagcagttgaccccggcgttcctccgataaacatcaaaataaccgtaaacgcgaggccggcagcacttaaatcagtataaggaaaagtaattaaaccggcagttcgtggcgtgattgccataaaaatagtattgagaatacggttggaaaaacttaacttatcacttaattgtgctaagtttttctcggtaataaagtaaacaaccacagaaacaacgaataaaactgctccagtacgtaacgctaactgagtatgcaaggatagccggtgatatttaggataattgagaatatctttccatactaaaaatcctaatgatccggcaacaatcaaaacagcaagcacacatagcatataagggtcattagcataatttgccatactattatcaaacaagtcaaagccggcattacaaaaggctgagattgaatgaaaaatactaaaccatattcccttaccgagtccgtaacacggataaaaatcaaaaaataaaaatattccacccgctaattggataagtaatgaaagccgaataataaggtaaaccacgttcaattgggataagtggtcaagattaagggcttcttgagttaataatcgtgttgacattcgcattcgttgccggatcagtaacgacatcatgactgcaaacgtcataaaacctaagcctcccacttccatcaagattgcaatcacaatctggccaaataatgtccagtgatgagctgtactaacaagagttaatccagttacgcaggttgcactcgttgaagtgaagaaagcagtcataaaatttgtcgtttctcctggtcgtgttgcaaacggcaaggagagtaaaattgttcccataaaaataacaattaagaacccaaatgtaagaattttgggaaatgtatatttatgtttatttatttcaatcacttttatccttcctcatatcaatattactcaactaattataagcgtttttgttaaattctaaaccattattttatttcccgggaaatcatctcgagaaagcgctacaatataactgtagattacccgattgcttttcctgaaaggagatccttttatgtactattcaaacggaaattatgaagcatttgctcgtccccgtaagccggcgggagtggataaaaaacatgcttacattgttggtgctggtttagcaggcctttctgcggctgtcttcttaattcgtgacgctcaaatgccaggcgaaagcatccatatttttgaagaattaccaatcgctggtggttcgctagatggtcaagatcgccctgatgttggatttgtcactcgtggcggacgagaaatggaaaaccactttgaatgtatgtgggatatgtatcgttcaattccatctctggaaatccctggtgcatcttatcttgatgaatattattggttagataaggatgatccaaatagttcaaattgtcgcttaacttataaacggggcaatgaggttcctactgacggcaagtatcttcttggaaagtcaactaaggaattaatgaaactaatccttacacctgaagaccagctcggcgatttaacgatcagtgattacttctctgaggactttttcaagagtaacttctggatttactggtcaaccatgtttgcttttgaaaagtggcattcgctagcagaaatgcggcgatacgcaatgcgatttatccaccacattgacggcttgcctgactttactgctcttaaatttaataagtacaaccagtatgaatcaatgactaaaccattgcttgcataccttaaagatcatggtgttaagtttgaatacgatacccaagtccaaaacgtcctggttgataccaagaatggtgaaaagcacgctaaaaagattattcttaagcaaggcggcgaagataaaaccatcaacttaactgacgatgatctggtatttgttactaatggttcaatcacggaaagttcaaattatgggagtcatcaccaggtagcacaaccaacccgagcccttggcggcagctggaaattatgggaaaaccttgctaaacaatcgccagcattcggtcacccggatgccttttgtaaaaacattcctaaccgcagttggttcatttctgcaactgctaccgttaagaatccacaaattgaaccatacattgaacgactaactaagcgtgaccttcatgatggaaaggtaaacactggtggaattatcaccgtcactgattctaattggatgatgagttggaccatccaccggcaacctcattttaagagtcaaaagccaaatgaaaccattgtgtggatttatggtctctattctgatacagaaggtaattacatcaagaaacgaattgttgattgtactggggaagaaattactaaagaatggctctaccatctcggtgttccagaagctttaattgacaatttagcaaaagaagagtcggttaataccgtccctgtttatatgccattcgttactagctactttatgccacgggtaaaaggcgatcgtcctgatgttattcctgaggggtccgctaacttagcctttattggtaactttgccgaatcgccaactcgggataccgtctttacaactgaatattcagtccggacggcaatggaagctgtttacagcctcctcaacgttgatcgcggggtaccagaagtctttaattcgatctatgatattcgcgaattaatgcgggcaatgtactatatgaacgataaaaagccgcttgaagaaatggacttgccaattccaaagattgttgagaaaccactgctcaagaaaatcaagaagaactggattggcgaattaatggaagaacaacatttactttaaaaaactaggggagtgaggcattaggtatctctacttttgtcccactcccttcaatttaatataaaggagtcttttttatgaccaatgaaacgattaagcaccaattaaaccatcgtacaattcgggcctttaagcccacaactctttcaacagaacaattgaatactctttactctgttgctagtcatacaccaaccagtatgtttatgtagcagatgtcaattatgcacattaccgatccagataaacgggccgtaatcagagaaattagtaagcaaccgtatgtcggcgcaaacggtgacctgttcattttgttagttgacctttatcgtaaccaacaaatacgacagcaaaagggcaaggatgatggccgtttacataccgctgatattttcttccaaggccttgatgatgcaatcatggctgcccaaaacatgattactgctgccgagagtatgggccttggcgttgttccccttggttcaatcaaaaatgatccgcaaaaaatcatcgaagtccttaacctccctaaaatgaccttcccagttttaggcttacaaatcggtatacctgaccaagaacctcaactaaagccccgcctgccattaaaatttatcgcatttgataatgactatccaaaagagatcaagctcagtgacttaagcgattatgatcaagaagttactacctactatgaccttcgtgatgccaaccgacgaattgattccttcaccaaccagattgcgggggctaaactcgatcgccactataccaagcgcgatgaaattatgaaggtgttacaccgacaaggtctttgcactgatgaaggaattgattagttcatcccctcaagagcagctaatgtcgttaaggtcgcatcataataatttttctctgttaagggtttactgaaaatgtgtttctggctagcaaacagattatcatacccttcattacgattgcagctaaccgcataaaaaatcggcgcactgaaactatttgattgatatttaaccaatcggtgaccgtttaatgaatagccagccgtaatataatactgttcactgaagaacctcatcattttatttaagactttctgagctcgtggatcattgctttttgccaacatcattggaacccgacaagcattcgcactatagtctccatcatattttccagcaaccgtattcggccccactggcttggtactccctggtcgagcccaggcaaagtcaggtactagtcctgttcggtgctgtttacttaatgcagtcagacggtcaagcatattatttttgatcatctgccaccttgaatcgtgagtacaatcgtataaatgatcaaaaactgtcggcattacatctgaagttcgcaataaataataaaacttagaatccttcgtaacccaatcacccactgttaacatgtgcgtggttgggttatattcatatttcataatatcagtggcaatctgttgctctagcttatgataataaggtgctttttgtggccaaacttttgcagcccggtgaagagccgcagcaatgtaaagatcaccatcagtcgcactattatgatcatcaacccattgaccttctttattataagactgacgccaggacattaagtaagttagctggtcatggtgttttccaacataatcgcgatgtgcaaggtaatagttaagtaacttatcaaagtcattttcacttgcccagcccttttcagcagcgcgagatactacttgcagcccgtagccttgtccttccgataatgcaacaggatgtttttggtcgttgctggtattaacatacgtttgcttattatttttgcggaccaaatatgtcccctgccaccgccgataagcttcgtattgaatatgttcaggattctttattcttacaaacgcgagcgttgcaatataaataactgcaacaacgagcgtaagaagccaaatatatactggacgtttcataactaatccccttattagtcagcaaaccgcttagtctttacccattttgtcccgtcacgccgtaatagtcgatcaagtgcaactgagattaccgcatgaatcgaaacaattataaataattgtgaataggtaaagtatgaagcaagcgctaaccagatttgcttattcgtcgcttgcccaaattgcgtagctgctgctgttgtaatttgtaaaatatacaagattatcattaataaccaattaaaaagcaaaagttgggcgattaggatgttactttccccgaatgtaaagggaatcattacctgtggattgaaaagatgaacaatccaaaaacctacgttcgctaaaaagattgcatcagaaagaacaattgccgcattaaaccagaaaaaagtacaggaataataaagagtttctaactttactcgccaattgctccggtcaaaaagatgcctaaaatttttcaagacaacctgataatttccttttgcccatcgtaaacgctggtagtaataatcatgcaggcgttttggctcctgttgaaaagcttccgaattataagctaacgcgattagttttccactttgcataatcttaaatgaaatatcagtatcttctgttaaggctccatttgcccagcctccgattgaacggacatatttactttgaatgataaagttagttcctgggatccggccaattttaaataaatgccaaattgcacagtgctggatccgttgggtaacaacaatttcttgattaatgcacttcgttaaaaagttttgctcggcattgcgtgtcttattccggccaaatgctgcaacgtaccgtgttggattttcgaggatttttcgtactaagaaatagagggcgtttttttccggcattgcatcggcatcgtaaacaccaatatattcaccatgagccattttaagggcatcgtttaagacaccggccttccctccgctaccatgacgttctatcacctttgcttttcttttctcatattttggaagctgtaacactgttcgggcccgttgagcagtttgatcattgcaattatccgcaaagattaataattcgaccttatctgctggatagtttaattcaaggattgcttgggtcgtctgcgcaataactactgcttcgttatgagcgggaacaacaatcgtaattaatggatatcgttttaatgggacaatatccacaatttttctactatgctcaagccaaaagtgaactgccccacctaatgtaatagatgacattaatagcgaactccaaattgagatcagggtcacaatcattacaaactcggtcattgctttttcctttccctttttacatttagtgttgtctgttcaacgcgaaaataaatcacccactgaagaaccgcaaatattaatgcctgaacaaaaaagatcatcgtaatcaccatcgccaaccaaaagaaaattcgtatcattatttctgaactcctcttagatactcaacgacaaggtctgtttccatatctcttttaatatgacgcattacactttccagattcttaaatgaagtcgcattaatatcatcaactttcaaatgtccccatttaaattgaggctttgaattattaatttgtaattcatcaagtcctgcacgtgtgctttggttctgataagcaaatgtaatatctggtaaatgatatgacaaaattaaaaaagtaccatcttctaaatagtacagggcttcagatggtaatcgtcgtcgttttaagactttcgcaatttgttgaagggcatagttataatcttgaggatgaaattgacgtatttgttgattatgaacccagtgaatcgctgtaacatcaatccataaatcagcaatctgttctttaataatgaattgaagttccttttcataaatcttattagcattataggccgtctgaagttttactatttgattatagtgggtcgcatagctttctatctccgcacgattgcggtcaagccagccccactcaccaataatgtaccgactgaaatacgccaaacttgcggtaattggaaaggcaaacagtaacattattttgattgaattatccattaccacataacctagcaataaaatggcactaccaatcgttgttaggccgattgcaagccaggttaaaataatatttggtactaagctccctaccattaagcccaaaatgatcataatcatcatggccgtcgtaataaaatgggcgtattgggatgcccaccacatcattaacacaattgcagtcaatattacacaaagcgcaataagccccgattctacaatatgtcgccgaatcataagaatgttctccctttcttcctataaattagcaactaatatcttagcacaccttttttagatttcactagtttaaaagcttggtaaataaggagttatgctttgtttgtaaaaataatttatcattttataacaagtaaattcccttgaaaaaattactcttttctatatttaaatttatagacattcatattagatatgttttatttttgtacgttgataagcaaaagcacaataattaaggtaaacaaaaaagcctgatttaactgtgcaggaaaaatcaggcttttaacttagtaaactcatcgatgaaacataacgttgctgatgttaattggataaagggatgcattgtttcaatgaagagtcttttatctaacttaaaaaacaagtggatttcttgtttgtaagtattatagcacacctattgtgaaaatgttaactaagatttaggatgattaaatatttttcgcaataatttcttatttatctactatttatcttattttccagcagtgattatcatcacaatatcacattatttctaattaaatttagaaataataaattaccttgtctgtctctgattaaaattctcctcggtattttatagataatatcattacttttatctaataattttcattatatctagttcattatattataatttagaaaaataaatatttttatgtgattggtgttaaaaaagctaagataagggtgataaataaattttgataaatttgtttaaaagaaatgaatttattattcctgatcacaccccatacggtcagcagcgatgattttatagctatttataaactactatttcattggattttatttatcaatttttatagaaaggagcagagttttttttactttgttagctaagtttaggggtatcatttgagttatttaatttactttatagctacttttcttcctttatcaaattgattaaattgcttggattcatatcactaatacttttaacctagtaattctcttttagcgtttctcattattcttagaagcttcttagaagcgctattgtttgatccaaaaatagaatattcattaatacgcaattacaaagcaatctctatatttaagctttctaatcaaaaagcaacctcagcgtcatcctttgacctcgagattgctttttatttgattactgatttccagttaatttccgacggactaacgttggatcagcctttcctggattcaattcgaccagtttccccgatccactgtaaataatccattctgctaagttaacaatatggtcgccagcgcgttctaaattccggataacggccaaatagctttcataggcttttacatcttcgccacctttaaccagtgctttcatgatttctttttgtaatttcacataaagtaaatcaactttcaagtcctcgttagcaacctcataggcaacctgctcatcagtatagacataagcatcaaggattcgttcaagcattttgcgaacaatcatcatcatctgttcaattggctgttcgatgtcttcatgatgttcaaatttacttaaggtaatcgcagcgcgggcaatatgggtcgaatagtctcctaatctttcgatatcagtactagcttttaagatactgataattttccgaaagtcggttgcaaccgggttttgtaatgccattagcttcaacgcctgtttttccaaatgaatttcttcatcgttaatctttgtatcagttgttaaaaccttatctgctaagtccgcatcatgatccgtaaatgcctttgttgcttgatagatctgctcactagcgtcaattcccatttccatgaagtggctccgcagccgttttaattcatcatcaaaaattgctcccatgttttcactcctaaccaaattttccgctaaggtaatccgccgtttgttgttgttgaggattcataaagatatctgtcgtctggttaaattcaattaattttccttggtgcataaaagctgtccagtctgctgaacgtgatgcttgctgcatattatgggtaaccataataatcgtaaatttctcttttaattgtactaaagtatcttcaatttgcgaagtcgaaactgggtcaagagcacttgttggttcatccatcaagataatttctggttgaactgccagcgtccgcgcgatacaaagtcgttgttgctgccctcctgataaggcgagcgcactttcttttaagtgatctttgacttcttcccacaaagcggcctgacgcaaactctcctctactcgttgatcaagaatttgccggtcctttactctggcaagccgtaatccataaataacattctcatagattgataaggggaacggtgttggttgctggaagaccatgccaatttgttgacgaatccggtaaacattaactttaggctggttaatattcaagtcatgaaaattaatttcacctttgaccgttgctaagtcatcgttcatccggttaagacttcgtaacaatgttgactttcctgaaccagaagccccaatcattgccgtaatcttattggccggaaatttcattgaaacatcatgaacaacgtgtttgtcaccatataatacttgtaaatttttcacttcaagagcaactgaattttccattcttttatcctcactttgcaagtcgttgcttaattaaataaccaatatatctagctaataggttaaagattaaaattgttagaatcaaaaccgctgctgaaccatttgaaacagcacgggcatctggaaccaatccctcactgttaactttccagatatggacagctaaagtttcggctggtcgtaatggatttaagaaactggtaggactaaatggattccaattggtatagctaattgccggtgaactctgcccggccgtgtagattaaggcagcagcttccccaaagatacggccagcacttaggatcgctccagtaataattcccggtaaagcagccggtaaaacaattttagttgttactcgccactttgacattcctaatcccaatccggcctgacgttgaagataaggaacttggcaaagggcgtcttcacatgcccgcgttaaaatcggcaagttcaaaattgttaatgctagtgcccccgcaagtaaggagaagtctaacccccattgcaaaacaaagactaagtaaccaaataatcccactactactgatggcaatgaactcaaaacttcaatcgccaagcgtaataagtttgtccaccgattatctggtgcatactcacttaagtaaatggcagcacacaatgctaaaggaatcgaaacgattaatgttaaaacaaccaggtaaagagaattaaataattgatcacgaattcccccaccacttctaaatgattcagcgcttgacgttaagaaatgccaagaaatatggggaattcctgatagtaataggtacgctaacaaggcaaataaaactaaccctactaaaccggttaaagttaaaataatcacggttgccaaccgatctactttttctggacgcattattttacccctttccggctaacgagccgcattaaaagattgaaggccaaggacattactaatagaattaaagctaaggaccagagtgcattgtttgagatcgtccccatgactgtgtttccaattccggtagtcaaaacactagtcaaggtggccgctgaatgcatcaatcccgttggcattaccgtcgtgtttccaattaccatttggactgctaaggcctcaccaaatgcccgggccatcccgaataccattgccgttaaaatcccgcttttagcactcggaataatcacccgcgaaatcgtctgccagcgagttgcccccagccctgcagacgcattgcgatattgtttaggaactgccctaaaactatcaattgtcatcgaggtcattgttggtaaaatcatcaaaaacaatacacaagtagcagcgagaatcccaaagccagtgccgccgaaaaagcgacgtaagaagggaacgattactgttaaaccgacatagccatatacgacggatggaattccgactaataattcaatggtcggttgaagaaacttatatgcggttgatggcaaaatctctgtgattgcaatagctactactaaggcaagcggcaaagcaattactcctgacaaaagagtaacgctaaaagaagtggcgatcatcggtaaggccccgaatacatgatcacttggccgccatttaattccacttagaaaatcccacaatgaatagtgattgccagtaaagagggcaattcctttccaagttaaaaagattaagatcgttgccactagtcccccaattaaagtaattgcaagataactaattactttccctgaggcttcctgcttactttcaaccgagggctgtgtcaaacgttgtcgtaagtcttccatcgtactatttcctttcagttactttcccagttggtgttttttcaactttcatatcatgaatgctaatatagtgagcttctgttacaagcgtcttttgaactttctcgctttgcatatacttaatgaaatttgcagttgattgggatggctgtttttgcgtatacatgtgctcatatgaccataatggccacttattagtcgtaatgttatcagcagttggtgctactccatcaaggttaactgactgaacttggtcattaagataagcaaatgcaatatagctgattgcccctggtgtatttctaataatttctttgactgtcccgtttgaatcttgttcttgagcatttactgcctgcatccccggtttcaataccgtctgttcaaacgcaacccgggttccactcccatgagcacgattaataactgtaattggcaaatcaggtccgccaacttcttgccaattcttaatttgaccagtaaaaatttgttgaagctgtttcattgttaaattcttaatgccaagttcttcattaacaattggtactattcccgaaacagcaacaatattatcatctaatttattggcattaattccatcttgctggtcagcaaagatatcagcagatccgatatttactgctcctgcttgtacctgactaaggccggttcctgaacccccaccctgtacaataatgctggtttggggatgcttagtccggtaatcatttgcaactgcttcagctaatggttgaagagctgttgagccgacaatggtaattttttcttgtgatggttgttgcttagcgagtacccatgacccacctaaccaacagactattgcgacgataacaaccccgataatcgttttttcattactattcctacctgtttattagttgttttcatatatttcgtatggtacaaatagagaatagcaagtcgatgtaaatttttaatctttgtaatgtaaaggttatgtaaattttggagaaagtattatgaccaataaatttttgctaatgagccagcaacgatctcgtccaccagttacaagctatttgtaaaaaagaacactggacctatgagctcgtgactactccgactgggttagtagtagccttagaaaaaaatcaaattagcggaatttggtgggatatgacgaagtaagcttagacaccacgattgctaccatgacccttattcggtcgcaagtccaaggaccgattaccgtttttactcctcgctttacggaacacattcaacgaaaattataccgggcacatgttgatgatgtaattgcattcctctcctccccagtattttccgctccttaatcagcagcgcttgtggacttaccactatccacagatgcattcattagctgatgataatacaaccaaaaatgacccagtaataactactggatcatgggaaattaatcaaaaacctatacttactaaaaatgataaaacaattgctttaacaccaaggaatttcaattactttcttacttagttgatcataaaggacaggtattaaatcgggatcaactcgttaatggagtttggggatatgatattcttgatacttcacggatcgttgacattcatatcagtcacctcgcgataaacttgaagatgactcccaacaccctactcaccttctcacagtacgggatttggctataaatttgtttaaaatacccgaaatgtcaatttaagttagaagaaagtagttgctcatcagtgacgtaggacatgaatacctcatatggagttcgatagcctagtgatttgcggggcaggttatttcgcttactcatcagttgggtcaccaattcatcaggaagattgcggaaatctagctgttttgttaagccgtcccggcgtaaaagaccgttgttgttttcgttcagccctcgttgattgggagcaccaacctcggcaaagtaagtgtgaaggtcaaattgattggcaatctcgcgccagccggcgaattcttttccgttgtcaaaggtaatcgatttgaagaagtgctgcgggaatttccgaagccactgacctaagtgttggttaatcgcatcagccgtcttttcgtgcacattgagtacaatttcgaccttcgattggcgttcggtcagggtcattaccgccccttggtgctttttgccttggacggtatcagcttcaaggtgtccaaattcagtggcatagtgcggaaagtccttggcacgctcgtgaatacttcgccccaattggccagccttccgcggcgctcaatatagccattcgggtgccgcttacctcgcatgggcaaagcacggacatccaaaccgaactgcccccgttcaaacatccggtaaagagttcgccggttacaactaattgggcgctcagcgcgcccaataatggtgtcaggcgtccacccctgggcaattttgtcgttgatataagtaagttcagccagtgacaactgagtacgttttcggccacaacgttgcttattgcgcatatagtgatcttgataatcagcaattgaggcaccggtttccaggtaacgataaacgcgataaacggtttcggcgctacggttgatcatttgggccactcggtacgctttaagcttttgcacgaaagaatgggcgatgattgtcagctcgtttgtggtaagatgggtgtaagtcatttgtggtttcctttcttttgtttaggggtattcaaaagtctaccacaaatggcttttctatttttctaacttaattttacaaacggcgataataaaaaatgagcgcggctggaaaaaaactcctagtccaaaataaaaaccggatgatgaattttttgaacaattcatcatccggtttttatgtacacaggaaatcgttcctgatatgatgtaattatccctaaaaacaaccaaagggagcgagttccatgtatccaaattataccatagggcaaaccgaattctcactaaactataactatgatttaccacaaaatcatgttgcacgattaattagtgattttgtcgactcgattccacaagatgtgctattagaagattcagtagcggctaccggccgccccttcatcgcatccagcaattatgcttaagattctcttgtttgcctacgcacgccaaacttattctggaagaaagattgaaatgatgttggatgagaacctaccaatgcgttggttagcttatgattatacttatagctaccataccatcaataactttcgccgcagtcagcacgccagtaagctaattaaacatgcctttgtctactttaccatggttttgaaagatcacagactaattcaaaacgatgcggtttttatcgatgggaccaaggtagaagccgatgccaataaatattcatttacttggcgacgggcagttgaaaagtatcacgctaagttaagagaaaagacaagtaagctttatgaggaactagtagaaaagcaagtggtgcaagaaatggcaccggagctggttacttccgccgaaggcatggacgtaatggaacaagaactggcggagaaaatcactaagctagatggagagattaagcaagaaccaaaaatcatcaaaggtggttcagtgagaaaacggcgccgtcgttttctaaaaaagcttcgtcaccaattaagcaacgacctaattccgcgtgccaaaaagtatgaacgtgccgaaaatatcttccaaggtcgtaatagctattccaaaactgaccacgatgcgaccttcatgtgtatgaaggaagatccaatgatgaatcgggagttgaagcccggctataacctgcaaatcgctacccataagcaatttgtccttgattacgggctgttttcaaatccaactgacaccaggaccttagtgccattccttacccagtttcatgctttagatttctttgaacatatcgtcgccgatgcaggctatggtagtgagtacaattacacaatgattcttgatcggtttgaaaagtagccggttatcccatacacaacctatcaaaaggaccagaaacgtaagtttaaaaatgatccaactaggtcacagaattgggaatataacgctaatgacgactactacattgatcatcaaggagttcgttttagtttttattgctacagtaaatccactgatgagtatggctttaagcgtgactttaaactgataaacatcaactatcagttaaattagatgagctagcgaagacaccaggtggtcggcaacgctatatgaaggttaacccaacctggaattattataaagctaaagttaaagataccctctcaagtgacgaaggaaaggcaatttatcgtcgacggatgtccgacgttgagccggtctttggtcacatgaagagggattttggcataccccgaactcatctcagtggacaacgggctgtggaaaatgatatcgggctagccctgatggcattaaatctaacgaaatttggccaatcaattagtcgattgaagactaatttcataactaatttaaaatccgaactacgatttttggatcgatcaaaaatcatagtccggattttattgttagagaaccaagaattaatagttaattcccagcctcgttttattagtgtaatcaatttaatttatctttcatccgtgtgaattttagtaaaactaaatatactgttcaaccatgtttcgatactttaatagttctttttgccccatggaagaatcggggagaacgacttgaacgctattgttgccaccattttcatccatttgctgacgtccccatacccctaatgacataatgagacgggcaatttcttgaccacctgtcgtgagaacaaaacaaccagcttctttaatcggactgattaagtatttggtttgtaattcctcaattatggttatcgattgattatcagaaatattagtcaataattcgtgtaaatcatcaaagtccagcggttttattcctagccaaaaaagaactttagagtaatcagcattacgcaaaaagcttaaagaataagtaattccatgattagcttcttgattcatcattaacccactcccgcgtacaaaatattgtaatattcatcacaaattataacatgaggaaaaagcaatctcaaaataaccccctatttatttatcagattattaatcttaaagacacttttataaataaagtcaatttatacaatgaaatcgctatcaataacattatattgtatatttactttttagtaaaatttgtgcctcttttattccaaagaaatgtgatttaggactactcatcttatgagcgatcaatatttgttgcgcttgttcacactgtacttttgctaactcatttggctggaatatttgcagatagaatgataattgccgtaatttaatcgctaactggctccgcgccttcgtcaaagtcacatccttaaactgcttataatcatgaatcatgaaacgagttttccggcgctgtaaagcatagttaattgaattgctcttaatccggtgaagatcttgaactgtgaggccgtgttgacgaagaagataattaaacatcgtaatctgctggtcgacttgtcgccaatccgttgcaatatcatctcgtaattgtgtaatctcttctttggtaagacggtgggtaactccttgttttaattggtgatataaggtttgcagatcttgataatcgcgttggtggagtggaaggtcaacctgactaaataagttgcatcgctggtaaaggatcgtcccttcgtggttcttaaatccctgctgggcaacaacaaactggaatatcttttttggaaaacgccgaccagcttgataagccaacagaatactatccatatacaggttaatttcattaatgcctgcctggatctccctagcaactttgtggggaatgcttgcatgctgctggaagtgagagatgcctaaaaatagttgccgaccagttgtccgtgaacgtaagataaattgattctttaaacgccgaccacaatcacaatagaggttgtcgccaggatgatcatgttgtcgctgataccaaggatcaattaccattccctgaaactcccaatcagtctgtttaagatagtgatgagtatgaaaacgcgatagcatcgcataacgcgtaaattcactcaatgcctgaacctggtctggccttaactgttgtaaaatatcttctcgctgttgacgggtcaacgcaatgattttgtccatcctctcattcctcccattaaaaatactgtattactatatcagaacaaatgtttgatttcaaattgtctatttaatccctttctggtaaaacatttaattacaaggagtgatattatttggatttagacatacagcccgtgaggttgagtttaaaagaatataaacaagttaaacaattatatatgcgcgcatttccgaaatatgagcgagaaccgtggacgtggctgctcatcaagagtaagtatcaacgcgctgactttatggccttttatgaccaggaacagtttgttggatttgcttacgttattcacagtcacggtatgcattatattttgtatctcgcagttaatgatcaaatccgttctcaaggatacgggacacggattattaatgaacttcgtcgcctttaccctgaggattcgctggctctggacgttgagcagcctaatcctcaagcggcaaataaccaacagcggttacgacgacttaaattttatcggcgcaatggctttttcccaactccaaagcttttcaaagaggaaaaagtcacttttcaagttttagcaaccaataaaaaaatcaaccaacgaaagattgataaggcctttgagtggttctcatggccgcttggttggctgattcaataaagattttgattttactagtttgaggctgttgaaaaagcttttttgctttttcagcagccttttttactgtcaagaaaataaggtttacaaaagtgttacaatttatgtaagcggatacataaagaagtgataacattggtagaaccattatttttaaagccagtctttcatgagaaaatttggggtggtcgacaccttgcaactgatttcggttaccaaatccagcgggaacaattggggagtactgggcaatttctggccatcctcatgggccaaatatcatcaccaatagtcaatacaaaggccaactattgccaaaagtttatcagcaacatcctgagctgtttggtaatccacgctcttctgtttttccattattaacaaagattcttgatgctaatgctagtctatcaattcaagttcatcccgacgatgcttacgccgaagaacatgagcacgaactaggtaaaacagagtgttggtatgtcattcatgcagaacctggagcttatttaacatacggccataccgcaaaaacgcgcgatgagcttattaagatgatcgataatcaccaatggtcaaaactttttagtagaaagccagtaaaaacaggggactttgtctatgtgccaagcggaactatccatgccttaaataaaggaattatcgtcttagaaacccagcaaagttctgataccacttatcggatctatgactatgaccgtcgagataaaaaacaggtcagctacgccagcttcatttaaaacaagcaaaagacgtgacaacagtgccatttactgagccacaaattaacccccgcatcgtccataatgatagttcaataattactactttaatttctcaacctgactcaccattctttaccgtctacaagtgggagatcaatgattaaaccagcttgacctggtaaagaaattgggcgctactgaaacaattaataacacggctgaagatcccgtcaaagcaattaaggaaatcgttccgcgtggtgtaacttatgcaatcgatactaccggaaacaccggtgtaattaagtcagcaattgatagtcttgccaccgctggagaatgtgtcctcttaggagtttgcggcgatattaccttaaacttaatgaatgatatcttatcagaatctaagaaaatctctggggttgtcgaaggagatagcaatccccaagagtttattcctcaactagttaagtactacaagcaaggcaagttcccccttgataagcttgttaagtactacgattttgctgatattaaccaagttatcgctgactcaacaaacggaaaggttattaagccaatcatcaaaattgatcctgaattagctaaataattaggtgaagtgtttttatgaaagtaatttttgtttgccttggtaatatttgccgctcaccaatggcggaagcaatgttcaaaaaaatggttgcagaagctggccttgctgatcaaattactattggttcagccggaacaagtaacattgcagaaggttcacctgctgatagtcgaacaaaagccattctcgataaatatcacattaaagacgacggaatgattgcccgtcaattgcaggacagggattattatgatgccgattatattatcgcaatggatcagatgaatgtccgggacgcaaaagatatggcaccagctgggttagaaaataaggttcatggaatctttaaagctaccccaggaaaagaaaattgctatatcgttgacccctggatcactcaccgattccaagatacctatgatagcttaagtgaagctctccccaattggcttgctaagctaaagaaggaaattaaataactgtttatcaaaaaacacgcctgaaaatttcagccgtgttttttctttttattggtaattaagatcgtcaaacttcttatcagcgttttgttgtgccatatcctttgattggtagtaaacagcatctacccaatttccggcacccccggctgatacaagaactttaacctgctttccatcgattgtttcggtcttaacagtatatgatgaaccgtcaccggcattttgaacccaaccacggatatttaaccatcgtgatccatccatgttaaagaaactggctttcccccagttcttagtagcgttttggattccttcgttagtatagttatcctcgtcttcaccccactcagaatcctgtttaaagagttgagttgttgtactgctattctcaccactgtaggtaaaggtatgaggaccaaatgttattgttgaatcagcatcattatctgccgaataccatgttccctgcatttcacttggaacatcaatagtaccactgcggccatacttatgatcattgccagaattactggtgcttgctgaggaattgctatccccactgcgcttatcgactacctgtgccttagcagctaagtcattaacgagctttccctgaccttcttgattaacataattggccatttctgactttgagattgtggcgagtttagtactcttttgattttccttgacattttggtagatgtttacatcatcgttattaacagtgtaaaccaagccctgtgactttccaccagcagtcacatcgtaagctactccttgtcctccatcactcaattggtatttagaacttgggtaaagatttacctgcaatccctctttttgcgcttctttagccatggcagcccaattcccaccataacgaaggccacaatacgtactaatcaaactaacagcttcttgggggctcatgttatcactattaactttcacattacttttagccactaataaactactgcttgaggcagatgaagaattagccgctttattgttagcctgatttccacaaccagctaataataggcccatccccgtaaccattaaaaatcctatttttttattcatattaatatactcctataaaaaaatgaggctggagaaaatttttgttttctccagcctcaactgtttttatgaacaatagtaagataacatggaaaataaccacaaggctcaagtcttagtacggacgataatcgccgtcttagcttagtccaccgccttgtcgagggggttatttcccacttgcatatttaactaagcccgtgacttgtagctaccatcagtagtgttgatgattaacttgtcaccattcttgataaatgcaggaacgttaacaactaaaccagtttccatcgtagcaggcttaccaccaccatcgatagtagcacccttaatcattggttcagtttcagcaacagttaattcaacagtagttggtaattcaacaccaatgatgtcgccgttaacaaagtttaagataaccttcatgttttcaacaaggtagttcttgtcgtcaccaagcaagtcatggtttaaactgtattgttcgtagctttcaaggtccataaatacggctgagtcaccttcatcataaaggtattgagcagaacgcttgtcaacgttaacttgttcaaccttttcagatggacgcatagtagtatggacaattgaacctgaacggaggtcttggatgtccatttgcattaaagtgttacccttaccaggcttgtggtggttgatttgaagaacctttaataacttaccgtcacgttcaaaaaccataccttttttcaaatcaattgtttgaatcatagtataaaaactccttcatataaaactgaactcttttaccgattaatgggactttgctttaaagcaagccttaatctttggcttcgttccgtgccgttaatcatagatagttaccatctataatttacattcactgtctattgtatcacattccctaatcacaacaatagcagttgttaggatgttttatcaataaaaaactgtctgcctatttcataattttcaatagacaaacagcttttttctttgatcgatacttctaaaccagctcaagatgtaattgcttttcaccgatgaatccagcgcgcttaagaacaaggtaaagagcaattgaaagaacagcgggtgctaccacgccgaaaaccatgtatgtgctgaactgagcccagccgcgtgataagtaagcaattggtgcaatcaaggagtttagtcccaatcctcctaaggtcgatgttgaacggaaatcaaacagaactgttgcaattggtgcacaaacagctgctgaaacaaccgttggaactaaaagataaggattgatgaggagattgggaaattgaactttaggggtaacaagtccttgggcgatatttgcgccaaggttattttgccgaaatgacatcgcagtaaaaccaacaaattgagcagtagtaccgatcaaggcagccgccgaagagatcggatcaagcatcaacgcaacggccaaggctgcagaagaggcaggcgtcatcagaaatagggcccacacaacggaaattaccattgatcctaaaactggtgaaacttgcatcgaatgcgcaatgtaggcggacacagcaagaagcgccggcgtaacaactgccgcaacgactagaccaaaaccgatccccacggctaacgcaccaaatggaacaagaaccatatcaagtggcgtctttccagttaaatacttaccgacaagaacagcaacaagtgccgctagaacagcagaaacaggttggccagtagtaagaaccggtgctcccgctgccgccgcagttacttgccctgttgcagtcattcctttaaccgccgtatcagtaaaatgaacaccatttgatccaacggtagccgctaccattgatgcaaatgtaactaatgtatttgtgttcatctgtgaagcaaccgcaaccccaatagcaggcgctaataatgcttgagcctcaccaccaattagggtaaggacatggatacctgtcaagttaccaattgtttgagttaataatcctcctcctagaacgaccaaaatagcattagccaccgccgcaaaaattcgataggccacttccttgacctttgatgaattttgataagttgcattagctttagaattgctaactcgattttccatcattaacgcctccttataatttgtttttgtttaatgattgttgttagtttatcggagcgaaaattaaaagtcaattatatttctcatttatttttaatttaaatcaagaaattgtttttattaaattctttacgatcgtcacatttaaagtaagcgcttttgtaaatgaattcttaagaaatcataaccacccgtcaaacgggtggcttgcacataggctataagccgataataaaagccggcgtctcaaggcgctggctttcgctttgctcaagccaaaatgctctgactactttgccaccgctttaagcggtgtttatactacctcacttacccttaaaagggtccgaatattccacacttgttagcttatccattgctatatcatgtttctcttgatctcggatatgcttctttatcgtggattcattcaatccaactgtacttatatagtagcattcagcccaaaaatgtcggttcccatatttatattttaagtttgcatgtcgatcaaacatcattaatgcacttttctcttttaagtatcccataaactactagacacttagcttcggcggaatacttactaacaagtgcacatgatctggcatcatatgaccttcaattatttctactctcttatatttgcacaataaacgaatataatctcttaggtctcttcagtattgattgaagatcgctttacgtctatactttggtatgaatacgatgtgatacttacataaccacttcgtataggctaagctatttaatttattagccatatttatataacctcttttcccttattgactttggcttgaacacctacatcttaaggcaaaagaggccttttttatataatttttatctcccacccgcatagcaggtggttttttgtttcgtgcactcgctctgctcgcgcactcaactaggtctaaagacattaataatcatagccaccatttgtggtagtagtggctgttgttgcaacaatcttattttcttgaattgcttcattggcaggggtgtcagcagtatttacattgaaagtaagaaaagcatttttattttcttcttcactattagttttatttacagaagaagcggaacttgaattttcagtagcctgagcagttgtagtcttttgttcactggttctagaagtgtcagtagtattagctacaatatttatcttcgtttcagcagtatctagggcagtctcatcccctgaattttgcggttgcgccgattcagctacaataccacctgcttgcgttgttgctggggtagtcgtatctgcttggacactagcatttactaccccagttggcccaaaagccaacataaaagtagcacaggcagtaatccactgtttcttcgccttatatagtttctaattcttatttttgggagtcatactccgtaaaggattatttttacccataagatctcccccgtctcttaatcatttatccatctataattataatccaatacaagttcttttaaattaattttttatcatcctattaatttaaaggtcaacaaaatttatccttggcattgttaagagcaaaattaataaaaaaacgaatggtcgctttacgcttaatcccatccgctaccacaatacattagtcattgcttttcgttgtttctttcggttgcttctttgcaaataagtgatacacgagtcgggcaaccagtgcttgtaaaacaatcgttactacgctttgtgcaagttttcttacccatttcataattttagctcccttacttaaatcatgccttgtagttaaacctaatcttctattactttaattatactcgtttcttattaatttgtttaatagaagtctttatcttaagattagataaaattattaattttcataataatcttcaattcatcaatataaacgcacaaaaagccctttttattcgataattgagaataaaaagggcttaaaattaccacaatgttgtcttttggctaattataattttattattaattttctagataatttaatggcttatcaacattcacctttgttccttgatactttttagcaatccattgttgaatttgcttattatggtaaagcttgactaacttcttatattctttattatcacggttcttcttagcagttgctaaaacattaatgttatccttcgtgctttgatcaactttttcgtgataaatagaatctttcaacacatttaaatgaccagttaaagcaatcgtattaccgattaatactaaatcagttgactttaatactcgtggtccggtggtatcatcaatttctttaaattgaaggttctttggattagccgcaatctcattggttccacttgttgccccaaagcccggcttcaattttatcaagcctgcactttgtaagagcaagagaccacgcgccgtgtttgctgggttattagcgatcgcaactgtggcaccatctggaatgtctttaacactcttatacttatctgaatataagcccattggttctaaataggtagttccaatcgccgctaattgtgctttcttattttccttattataagcttgcagatatgaccatgattggaaagcatttacgtcaatttcaccactagcagtcgctcggtttaaagctacgggatcagtaaagctcttgaccttaatcttcaaaccttcacttttggcctgtttactatttgcaatgtgttgccaaacctggacatctgggccaatcgttccaacagtaatctcatcgttgcgggtaaacccaccattagcgcccacactaagtccagctgcaactaaaatcactactacaataccaacaatccaccagccggtacgctttttctttctcatcataactacccctttacttttgttttcgctattcgtcataactagtcgcaatagccaacgggatccgacatgtcgttattctcgagaaatccttagtcagcgtttaccaaaattattattagtcaaccacgtggcgttcaaatggcttatctgaaatcccttcatcaagaatcttctttgaccattccttagcagagaataatgaatgatcacggtagttaccgcaagattcaatcgttgttccctgaacatcttcccacttagtcttgtaggcaatttcttcaagtgaggacttcaaggccttggcaacttcagtagttgagtgttcaccccacgtaattaagtggaaaccagtccggcagccaaatggggaacaatcaatcacgccatccaaacggtcgcgaagcaaaccagcaagtaagtgttcaatcgtatgtaaaccagcagttggaattgcattttcatttggttggactaaccgtaaatcatagttgctaatcttatctccctttaccccttcttcaacggtaattaaacgaacgtaaggtgccttaacctttgtgtgatctaatgtaaaactttcaactttagccataataaatctctccttttctgcctgatgagaatgaatcttggaactaaaaaatccctaggaacggcaatccaaccaattcctagggacgtttaatattcattaacgtgataccaccctaatttagccttatctcacaataagacccgcaagaagtacataaaaatactccagcacggtaacgggtgctaatcgcttgctgctaacacgtatgctcacagcatcagtctgctccaagaccatcttcattattcgttaccatactggttctcatctttcctagctctctgtaatggcattaaataattactcatcttttctaagcaatttctaatttaattgtaattataatatccttatccttactaattgtcaacacctatttcaaaattattcatgatataacgttcttaacgttttagcatcatttttagttattccgtttttgatgtttcgtgggatcatcacactatgctcatattctggagcgtgagccaatccaagggcatgtcccagttcatgttgggcaacctcacttcgaaattctttattagtataatctaactgattagggtccaaagttaaagttgccttatgcaaggtattcgtagtcggatcatattccgtccgggttgagccgagttcagatgttgtatagccaacaccattgtttcccgtattatttcgtgctagatcaccatcagccgcaataatattggccttatcttcgttcttagtccagcggatatgaactgctttcgtcttattccattttttgaccgcatcacgaaaagcccactttaattttggatcagcagtttccatgtaaatagtaatattctttttcttccacctaaatccttcaagcggtgtcggtgtattttctgggattcttagccgttctgcatttggtcgttggccgccattagaaaactgaaaatcattactatcagaagaatcctgactaaaaaatgatgattggaaaggttgggaaggcgcatctacatcagcatagacatgataatcgctaattccaaccgtccccacgactaagagtgctactaaaaatcgacgcatttaatcatccccattccataaagttagaaatgacaacacggttcgaggcgttcttgccagaaactaacaatccagttctgggagaaaaagccgatcaccgttccaatattaaaagcaaagattgcatgatttttaagagaacataacaagataatgataatgggcaaaataatattaaattacttcgtgaatttaagactggcgcggcgctttaaatagactgtcaacttatcatgcggttgaaaacaacaattacactgttgataaagggcatacccggcaaaggcaatcactaagccaagcaggttaaaaccaaagcgcagaaaaatgttcatcgtatcaattccccaaaatcgccataagttcgcaaatagttgcatgaaaatactgtacggaactaaaaatgttaactcccagccaaattctttaggagcaaattcgccaaccaaaagaatatgtagtcatcgctaaatatcccagcgtccaattatgttcttcttctaactctacaatcgcttcaagtaactctgcttgctcattataatatcgacttggctttcgattgagccatttgtaataaccatctcgcgaagaatcagctattttacacaactggctaattgaccatccattttcctgatttagttctttgatcgcttggtaccggagtcctttttcacctcccgattgcgtatttttgttaatttttttgcgaacgcaatctctatcttttgcttttctagctgagcccttaataagcgattttctgccttgagtcggtcaacttccgtccacttctcttctggcttagctttgcctcggcgatcacgaagtgattctgggtcattaccgcttttgcgatacttttgataccagccataaatctaatgcctcatctgtttgttgatattgttcaaccaatgagtttttaaattctttagagtagctttgattatgatgacttgcttgaagtcctggcattccctgatacttgtatagaagactccaccgcctgatagttttttggctaatcttgtatttaattattaccttatggattccatttcgtaaaacttcattgaggattaaaaatttttcctctgccgagtatttagattttcttcccatagaaaaagccctccataactacctcggttgtcttagaaaggatatattcctcatgactaatgatatcaacttttggaccggaatcaaggacccttacttaatcacctacactgttattctcggcgtaacttccaatatcactggttatccaatcaagaagtcgtcgaacggctacccgatttctctccagatctaagggttactatcaagacttaatagccacgattagtaaccgcagtcaggccttgttagatcagttaatcaagcggaataatttaccaagtgcgatgcgacgagttaagcgaacccttgccaagcaccgccaggagatcattgccagcttttacatccgactaaccaacgggcctatcgaaggcactaataataaaatcaagataatcaaacgaaccgcatatggctatcgtaacttcttccattttcggattaggattcttatttcgttgaagacttctaatctcatgattcgtgaattatcaaaaaagagaactagaccaaaagccaaagtagcttagtctagttctccaaattctcttcatccttaccgattgacaaagagccagggttcatggtatggtttaattatcaaaattaaaggaggtcatcatgatggctgataaggtaatgacgagggatgaactagcaaagtacaatggccaagctggtcaaccggcctacgtagcagttgaaggtgtaatctatgacgtctctgctaacccggcctggcagggtggccgccaccatggaaacttggccggtcaggacttgaccgacgttttgcttgaaaagtcaccccatggtaaacgggtattaaaggatctgccagtcgtcggtagacttgctgaatagaacaccaaaacagctgcggagggaaaatccacagctgttttttatataacaccgtttgtaaaattaagttagaaaaatagaaaggccatttgtggtagacttttgaatacccctaaacaaaagaaaggaaaccacaaacgagctgacaatcatcgcccattctttcgtgcaaaagcttaaagcgtaccgagtggcccaaatgatcaaccgttgtgccgaaaccgtttatcgcgtttatcgttacctggaaaccggtgcctcaattgctgattatcaagatcactatatgcgcaataagcaacgttgtggccgaaaacgtactcagttgtcactggctgaactcacttatatcaacgacaaaattgcccaggggtggacgcctgataccattattgggcgcgctgagcgcccaattagttgtaacctgcgaactctttaccggatgtttgaacgtggccagttcggcttcgatgtccgttccttgccgatgcgaggtaagcggcacccgaatggctatgtcgagcgcagcgggaaggctggccaattggggcaaagtattcacgagcgtgccaaggactttccgcactatgccactgaatttgggccccttgaagctgataccgtccaaggtaaaaagcaccaaggggcggtaataaccctgaccaaacgccaatcgaaggtcgaaattgtactcaatgtgcacgaaaagacggctgatgcgattaaccaacacttaagtcagtggcttcggaaattcccgcggcacttcttcaaatcgattacctttgacaacggaaaagaattcgccggctggcgcgagattgccaatcaatttgaccttcacacttactttgccgaggttggtgctcctaatcaacgagggctgaacgaaaacaacaacggtcttttacgccgggatggcttaacgaaacagctagatttccgcaatcttcctgatgaattggtaacccaactgatgagtaagcgaaataacctgccccgtaaatcactaggctatcgaactccatatgaagtattcatgtcttacgtcactgatgagcaactattttctttctaacttaaattgacatttcgggattttatcctccccaaacgtaattgaactactcccacttagctaaacctacggtttaattgcttgaagtgggagattctggaaacatcgcatacttaccctaccgattctgaacgaaccttcaagcagaggttacgactattagccaaggctcgtcccgagcctaactttatctatcggatagctaatcctttttgcaagatgacttgtgcagcgttaatatcacgatctaaatgtttaccacagtttggacaatcccactcacgtaccgctaaccattccgatttattcaatcctaaccgatgattattcttcccacaattagcacaaatttggctagtatatgacggattgacctgaataagctttttaccgtaccactcacacttatattgcaacatatctactaattttgaccagctagcgttagcgattgctctagctaaatggtgattcttcatcattcccttagtattaagtttttccaacacaatgatgtcgtactttttgaccaatttagtagtgaatttttgtagctgatccaaccgttggttggcaatcttttgtcgatacttcgccaccataatacgagctttctgataattcttaaaatcatctaattgccgtggaactaacactttattatgatgatcccaggcgatttcctgctgagcctttaagaaccgacgactacgcaatttctcccaacgatacaactttttatggtatttgtcttcaaaatgattgatcggttccttgcatccatctgaaagattaagtaatgacttaagtcctaaatcgccaccaatatatttacttgttttaggaagagtttggttttcgctttccactaaaacagtaatgtaatattgaccagcaacgttcagacgaacagtgacattcttaattttacccattggcaatcgaccagctctaaaatagacgataccgagttttggtaattttatatgatggcaatctaaaactttaatattgccattaacgtactttgaattgtagctctgagaatattttctggatttaaatcgagggaacttattttgacctttaaaaaagcgttgaaaagcatcggctaaattgcgattagcactttgcaaagcagttgattctgcttgtttcaaccaaggatactcaaccttaagttgtttcaacagattattcatcccaaaggcattcacaaatttagcttccggattattcttgcgccgttcaatttgcatattaagcatttgattccatacaaaacgaacacaaccgaaggtttgccagagctgatttcgttgtgctgaatttggatagatgcgcattttaacggcttttagaaccattattttctcccttgactttcaatatatcgttttacaacttctaaaggcgctccaccagtgctaattaagcaatagctttgtgtccaaaaggctgatttccaaagatattgcttgatttctggaaattgttttttgaccattctggagctagacgatttgtaagcatttaaaatttagccatttccgtatgaggcgttgctctaaacaaaacatgtacgtggtcctgatcatgattccattcttgcaaattaatgccgtatgcttgtcccacaactacaaaacgatgtttaagatattcagatatttcatcgttaattacttttcgacgatacttaaccaccattaccaaatggtaattaagtaagtatactgaatgctgatttctatctaattctattgttatcaccacattttatagatatatactaaatatatcatagaacaaaagaaaaagcactaacgcgctttaagagagcgattcatcccctacttatagaagtaggggtattctcgcaaatttatggataaagaccagaaagaatgcttcccttctttccagtctacctattaatcttcaacttttagcgtcgttcattgccttcatgatagaagattctttgaatgacaatccttgatcatttggatatcttcttcacttaattcaacagtgtatttagccatgatcttcctcactttacttaaaaaattacacccttactatatcacatcacaggagcagtgtctggcttaatcagtaaattaagatcattaattgacattcaactgagatttgctaagattaacattgaattgcataaacggggagcttgcagacaggctgagaggggactatgcgtctcgacccaatgaacctgatttggataatgccaacgtaggaaggattaataaaggacgaccaggatcaaagtgattactggtcgctttttactttgcactatcttaatcaaatcaaacttaaggatggtggaattatgcaacgacagacaacaattatcgaaaacagcatgatttggtgtggcgccgggatttcaattgctgaaatcctaactggaacttacttagctccccttggttttacaaaagggatcgccgtaattatccttggccacattatcggctgttttctgctctttttagctggaattattggcggtcagcaacgtcttagttcaatgaacgccgcaaaaattagttttggccaaaatggcagtaagttttttgccctattgaatgttctccaattgatcggttggaccggcatcatgatttatgatggtgcattagcagccaatgggggctggcaccttaatcaggcattatgggtcattttaatcggcgccctgattattggctggctgctcgtcggggttcggcacctttattaccttaaccttgcgaccatctcaacattattaattctaagcggtctcctatgcgccgccatttttacccaccattctaccagttcaccaactggtacattgtcatgggctcaggggatggagctagttatcgccatgccattatcgtggttgccacttattagtgattacaccagtgttgctcaacgacccgtgccaactagcgggattagtgcagttgtctatggcctgactagttgttggatggccttcatcggtttaggagctgctatccttactcatgacattaacatcgccacgattattttacgggccggcttgggaattgccggtttatttatcattattttttccacaatcacaacgacatttatggacgcttattctgctggtgtttcttcaaaaacgattttcagtaaatggtcaggaacaatggccgcaattggtgcaacaattctaggaacaattagtgcgttgattttccccatggacaacttcagtaattttctttaccttattggttctgtctttgccccaatgattgcaattcaaattacagattacttcatcttgaaagtagattatcgtaaacaaaattgtcaatggactaacctaattctctggttgattgggtttatcatctatcgaattctgctaaattattcatttccactcggcagtaccgttaccacaatcattatcatcatcgcaataacctggggtacacagcaagttcgcaatttggtcaaagtgaaataattatagttttcctactaagtaatagtattattaatgcaattacaaggaaggaattacttttatgaaaaaaatagttgctaaacaagtatcaatacttgaactcttctatgatttaatttttgtttatgcgatctctcgaataacaatgatgattcatcatccaatcgatggtagcttgccgccaagaatatatattgaatttatcattgtcgttatcttcgttttacaaatttagctttatcagacagtctatattaatcgctttggaacaagtcgggccgtcgatacggttggcttattgattagtatgtttgccgccatctatttagctaataatattaatactgaatggcggttaacatttcatgcgttcaatctttcggcagcactaacaactattaacttaatctttcaatatttatttggctctagcactcattttaaacgagatcatgatctccaaggatttattattgcgcttggcttagaatttattcttcttgtaaccgggctgattattggttatcagtatggtgtctatctctgcgttgccggtggtttaatcggctttttaatgcccttagtgatgtaccgcatgtttaggccggaacaagtcaactttccccacctcgtagaacgcctaagtttaataattatcattacgttcggagaaacacttgttaacattacccattactttaagggcgctatctattcaccattagcaatcgcaatctttctaggagtagctgccctattcggcgtctatacattgctagtagaacgcttcttaaatcatcatcagcatactcgcggctttattgcgatgtacactcatgtagtaatgattatcagcctactctcgattacgactaggattatctatatggctgatgaagaagtatcacgtttgtttcttagttgctttgtcgcatctaacctcatcgtcttctacctttgtctctggctttatagtttttataatcgccgccatttacgcgttaatggtcgagatcttagggcaatggcgatcgtccttttactaggatcacttggcattattttatgtcgcgaaaataacctaagtttgatgagcgcatttgcgttaaccaacgtggtcgaattcggcttgttggaatggaagctgcaaagaaaaaaagccctctaaggagcctcacaacaactattcatcacataattagttttcatccgcatttatattccatttatcctaataaccatttagggcagatggaatttttattcccgaaatgtcaatttaagttagaaaaaaagtagttgctcatcagtgacatacttcatgaatacctcgtaaggtgtttgatagcccaatgacttgcgaggaatgttgttccggtaactcattatttgagcaacttcttcatcagctaggtggcggagatcgcgacctttgtggagcccatcgcgccgcagaaggccgttgttgttctcgtttaacccccgttggttaggtgcccccacctcggcaaagtaggtctggaggtcaaattggttggcaattgctcgccagtcagcgaactccttcccattgtcgaaggtaatcgacttgaagaagtggggtggaaactttgccaaccattcctgtaagtgctggatcacactggtggccgttttactatggacgttaagaatcacttcgactttggaagtccgttctaccaaagtcataacggcgccctgatgtcctttgccctggacggtgtcggcttcaaggtggccgaattcacggttaaagttgggaaagtcgatagcccgttggtgaatgctttggccaagttgaccggccttccccgccgttctacgtaaccattggggcgacgcttgcctttcatcggcaaggtccgcacatcaaaattgccccgctcgaaaaggcggtaaagcgtccgcatactacagctgagtggctgttcagcgcgtcccataattgtgtctggcgtccagccttgagccactttggctttgatataagttacctcatcagtgggcaattgaatagccttccgaccgcaatgagccttgttttcacgatagtgttggtaatattcttggagcgtgtggccggcggccagaaagcgataaactcggtagacggtttctaagctccggtgcaaaagtttggcagcccggtaggcttttactccttggtcacgaaaattagcgatcatcgttagttcgtctatggtaagatgatggtaggtcatttgtggtgtcctttcttttgatgtatgggtattcaaaagtctaccacaaatggctttttatttttctaacttaattttacaaaccgcgattttaaattcagttcaaatcccatatgtttattgtcaattttgtcatcaatataaatcgtaccgcgttttataaaaccaatatcttggcctattttttgaacaggaatatttttgtaatgagtatcataacggaaattccttactccttgcaaatacccaaccgtaagtagattggagaagatatatttcccaaaaccttgaccattgtgggaaggaagggctgctaatcgatgaatgattgcatatggctcattttattttaaccacgatccatctttaatctcttcatacgtttgttccggggttagttgtaaggtagccgtcccaacaattttttgattatcaattagcacccagttatagccagctttaatatcattttccatcgttttctggaaaggatgaccatcttgccattgtggattacccttttcttttaattgtgctcgtgcctgttcaataattgtcatcacactttgaagatcatccaaagttgctcgtcgtaagtaaattgccattatcttttctccttaatcatctctcactcctaacaacaaaattctaatatattaatgtatggtcattttatcacgattaattattaaactgatggggctttagctaagtttaagtgttttgtcacagcgttttcattttaaggagggaatctcatatttatccatattgaactactcccacttagctaaacctacgatttaatgcttgaagtgggagattctggaaacatcgcatacttaccctaccgattctgaacgaaccttcaagcagaggttacgactattagccaaggctcgtcccgagcctaactttatctatcgatagctaatcctttttgcaagatgacttgtgcagcgttaatatcacgatctaaatgtttaccacagtttggacaatcccactcacgtaccgctaaccattccgatttattcaatcctaaccgatgattattcttcccacaattagcacaaatttggctagtatatgacgggttgacctgaataagctttttaccgtaccagtcacacttatattgcaacatatctactaattttgaccagctagcgttagcgattgctctagctaaatggtgattcttcatcattcccttagtattaagtttttccaacacaatgatgtcgtactttttgaccaatttagtagtgaatttttgtagctgatccaaccgttggttggcaatcttttgccgatacttcgccaccataatacgagctttctgataattcttaaaatcgtctaattgccgtggaactaacactttattatgatgatcccaggcgatttcctgctgggcctttaagaaccgacgactacgcaatttctcccaacgatacaactttttacggtatttgtcttcaaaatgattgatcggctccttgcatccatctgaaagattaagtaatgacttaagtcctaaatcgccaccaatatatttacttgttttaggaagagtttggttttcgctttccactaaaacagtaatgtaatattgaccagcaacgttcagacgaacagtgacattcttaattttacccattggcaatcgaccagctctaaaatagacgataccgagttttggtaactttatatgatggcaatctaaaactttaatattgccattaacgtactttgaattgtagctctgagaatattttctggatttaaatcgagggaacttattttgacctttaaaaaagcgttgaaaagcatcggctaaattgcgattagcactttgcaaagcagttgattctgcttgtttcaaccaaggatactcaaccttaagttgtttcaacagattattcatcccaaaggcattcacaaatttagcttccggattattcttgcgccgttcaatttgcatattaagcatttgattccatacaaaacgaacacaaccgaaggtttgccagagctgatttcgttgtgctgaatttggatagatgcgcattttaacggcttttagaaccattattttctcccttgactttcaatatatcgttttacaacttctaaaggcgctccaccagtgctaattaagcaatagctttgtgtccaaaaggctgattcccaaagatattgcttgatttctggaaattgttttttgaccattctggagctagacgatttgtaagcatttaaaaatttagccatttccgtatgaggcgttgctctaaacaaaacatgtacgtggtcctgatcatgattccattcttgcaaattaatgccgtatgcttgtttcacaactacaaaacgatgtttaagatattcagatatttcatcgttaattacttttcgacgatacttaatcaccattaccaaatggtaattaagtaagtatactgaatgctgatttttatctaattctattgttatcaccacattttatagatatatactaaatatatcatagaacaaaagaaaaagcactaacgtgctttaagagagcgattcatcccctacttatagaagtgggggtattctcgcaaatttatggataaaattaaagaacaaacagcaacaggtttaaccgaattattggatcaagctcagttagaaaaagatgacctcgtagtgttatgtctttcaactagtgaagtccatggcggaataatcggaaaggactctaacattgagattgcctgggcgattgtttcgacagttgttaatatcttacgaaaacaccaactccatttagcagtccaaagttgcgagtaccttaatcgggcacttgttgtcgaacgaaatgtagctaaggagcgcggctttgagcaagttactgtcttcccttcgctccatgcaggtggtgcaggacaaattgctgcttttgaaaactttaacgattcgattgaagttgaacacattactgctgaagccgacatggacatcggtgatacctcggttggcatgcatgttaagtttgtccaagttccagttcgcacttcgataaaacaaatcggactggctcatacgacttatctccgcaaccgaccaaaattgattggtggtgcgcgcgcaaaatacgaatgggatccgtttgacaataaataattttaattatgaggctgcgagaaaactttttcaacagcctctttttttatacgaatcttgttacgatatcgtggaaatccttgtagactagctttgcattgtagccatccttgcgggagtgggactaaaaactcgcaagcaagtttaattctattccctttttcgttcaattatttaactttccgattacccaattcccaaaaagcgagggccgaggcagccgccacatttaaggaatcaacgcctgtagccatcgggatcttaattgtaaaatcactctgcgtaattgtattttctcttaatcccggcccctctgaaccaaggataatggctaatctatccaccttagctaactgaggatcatcaatatcaaccgtgttatgacggagcgccatcgcggctgttttgtagccagctcgatgaagaagatcaactccttctgactgccaaactttagcatcaacataggtccacggtacttgaaaaaccgttcccatagctacccgtgaggcccggcgataaaggggatcagctgagttgctcgttacaattaccccatcaattccgagagctgcggctgagcgaaaaatcgccccaatgttggtgggattaacaacactttccaggattgcgatacgcggatggtcactgggcatagtagccaaaaaattatttagacttggccgttcgacgcggtacatagctgctaatgctcctcgtaaaagattataaccaccaccagccaactgccgaagtaatttactattaactacataaattggcgtttgttctaatcccctagtttggttaattgccatctcatgatccaaatcagccaagtcacgctctagttccttttcttctattaaaagagatgctggccgataacctgctcgtaaagctcgttcaatcactttgggactttccgcaataaataaacccggattaggttcaagagcatgaaaaagttgtgcttcattaagtcgcatataaggatctaaatctgatcctgtaagatctgtaagaaaaattaaattatgcatattaaatttaccttatcttaaaaactgaattagtttagtatactcttattttcgacctttttcatgacggttattttataacgagtttcgtttgccgatcgggtaataaaatcacgttgaatcaaaagagaaacaatcattgctaaagcatcaataattatgaaaacaattaaggtgacatagtaattgtggagaacttggtgtgtgtaagaaagaagaaggggtcccaccatcccagcaattgcccaggcagttaagatatagccatgaatagctccaagttcttttgtcccaaaaacgtcaccgagatatgccggaatcacagagaatcccgccccataacaagacattaataagcacaacgctaatgcaaagataaatggcgccttaaataaaagaagaacaaagagcatcacaatatcaagaacaaaaatcaaactataggtaagtggccggccaataaaatctgataaagttgcccaagctagacgaccaaaaccattaaatagaccaatgataccaaccattacggcagccgcactcgctgtcattgtcgtcatgtcctgggccattggtgaagcagctgaaactagcccaattccggtagtgatattaataaaaaacataaaccataggaaggcaaatgtccgtgtccgcaaagcctgattagcagttaattcgcgaccagtcaaacttatccgttcagcattcttagcaatcgctggagggagttcatgtgatcgtggcttcttgataaattgggcagcaaccagcattacaacaaaataaaagcctccgagaatgtagaaggtatttacaacgccaacgttcgccattaaactttgcgcaattggccccgtaagcatcgctgcaaaaccaaagcccataattgctaaaccagtagctagtccccgcttatcgggaaaccaacgcacgatagtagaaaccggggttacatatcctgaccctaatcctaagccacctattactccatatgcgacatataataaccataattgatgagactgaatcgctaatcccgttaaggcaatcccactcccatagcaaatacttgaaatagttccagtaactgttggcccaaatttttctactaaacgccccataaaggcagctgacatccccaaacaaaagatagctaagctaaatgcaaacgatactgaagtttccttccagcctgtatatccagagattggtttggtaaacacactccatgcatagacactaccaatcatcaaatgcaaaattactcctgcaatagctactccataacgatttcttgttttcggcatcttcactactccttctctacataatttacgaactttatcataaattaagctctataagttcgtctatttaaaaatatcatagagcaactaacttatcaataagaaaaaaacgaacaatctaatttagcgatagcatttattactgcttgaaacttacctttaatagcaaaaaacacccagcttttacactggatgtttctcattggcaaatatgttgtttttaattgagttgacttagttttaaaactaccaaagtaccatcatatcgcagttccaactctaagttacattatataattctattcgtactcttttgtagagggccttgatatatcagtacttcaaccgtgatttagcttatacggtagaaaaccggtagacaactcgtattacaatgccacaaattgattaccattgaaatcaactaaagagtgattaggatattcaattttccctattgctccattcagctggtcagcaacagttcgattacgaccacgccataactgtgaataatacttaagtgttgtggtcggcttagcatgccctaaccgttgagatacagctaaaatatcaacattgtatttattaattaacaaacaagcatgtgacgtccgtaattctttagcctgaatacggtgaactcctgctaaatcagcatatcgattaacaatattattaacggttgaacgatgtaatggttcatcagtggcactcagtacataatgatcatcaccctgttgcggtaaattatcatactgtaactttttccaccactttaaaagatccacaaggtcagttggaatatcaatggtccgcatccccgcagtagtcttagtataattcttgcgttttttatctgggtctttagtattcgtcaaagtatgactaaccttaatatacccatcagctaaattaatatctgaccaccacaatgcaagtgcctcggaaacacgcattcctgtgaaatagtaaagattgagcatcacgtaagctaaggcaccttcaatatcaccaatataacactttgagataactttcttgaattcttcaagcgtctaatagtgaataatgtggtggcctttggaaatcgctcccgttgccttcttaatcctagaaggattttgagttaagtaatcaagctcaactgcactatctagcacttccctaaacaggccatataccaacgaggcatacgattgcgaatagcccttctcatctgagagtaaccaatttctaaactgtaaacaatccactggctggatttgcttcagtttcttgttaccaaaccactttaaaatcatctcaagaactggttcacgagacaaccaagtgctttcttcaacatttccacgataagttggcttaaacactttattgtagaaatctaataacttaacgttaccggactgcgttggaaaaccatttttactgtactcatcgcggatacgctcagcttctaaatgagcatcacgcaaggttttaaaacgattaccatttttatcccgacgtgccttcttgattatcttttttccagttaaaggatctaagcctagataaacgctaatataaatatatccttgttcgccatttcgaggaggctgccgatacactgattaatatttagtctttgccatcagcgtcatcctcctcaagaggaactcccaaaacgacttcttctatgatagcacgaggtgcaacttgcaagcgaggattaccccaaaaagtttttccccgtttaaccatgacctgacgagtatcatgaagaatcgtttttgcttgattaggcttaaagcccatagctatcaactcattctttgaaaccgttgctttcattgattaccaccaactttctgagatggtgtataatatgggcgacaatgatttggtagaattattgtggatggctttgcaatgctttggtcggctgcaaagtcttttttattctgtaaataggctaaaattagcgattgcctcataggacttcgtaactcaaacaagtgaacgtactgatgattacttacgttatgttgtttcttataatgttcaagaagcagaataggtaagtacttactaggatttccattccagatcatacaatatcgaatcgctcgataataaagatgaggatacatgcttcgccaagtaacacctattagctcatgaatcgaaacatcgttgcaattttgttcgcaatattgatcaatcaacgtatcaatacattgaaaatagaattcaaaaacattcaattaagctcacttcttttaataaaataagcttgattcaaagagtaagtagcgctctccataatctagaatataaaagcgcttaaactcttctttagtaacgcccagttcttcacgctcctgatcaatctctttttgacttagataattattcggttgtccgttaaattttaagccagctggtcccaatttctgatagaaattcaattgagtatcactaccaaccagcttcagcatctggtcgccagcgtagttcatgaacatgtcatcagcataaatgcgtgatagtcgacgcaatagcaataaccgttcaccagctggcttatttttgaaataatttacatgattattctgattcttcattaagtcattccaaaacttatcgctagaccgtgtttctttaatagcagtgaatagccaacgtcgctcagataaggtcatgttaaagaaagtctggtaatttttattttaagaattgattgtattttttcataaaaaaataccccctacattttcgtaggaagtatttttagtcaaccataccagttgacagatatccaaattaatgctttgcaaagaagtcgcggtagacgtccgggaccacccggtcggccgcttgccattgggcctggagccggttttccagttggtcgcccggggcaaagaccgcctgcaagtccgccaccatttggtcgacttgtgctggttggtaacggttgaccggggccacgtagcgcggcgcgtgcagcgtttcttcaaagcccatgatcaacatgttgttttcaaaggcgccccgcacggcatcgaggatttcgttgccacggttgatgtctaaatagacgtcggcgtgggccaccagtttccgcaccgtcttagttgcgacagttggatagaggtcaacgttagcgtagtggtccaaactcatcagcttgctggacatttccgtcaccgccgctatcgcgaagtggaagtccggcaagcccttgatcagactttcaatttccaccaactgatcagaattagtcaggatcaagatttccttgcgttccttgttgagtcgttggaacggataagcgtaaccaaggtagctcagctggacttgctgctgcggctggtcggctaccaaacggcgcaagttgtcgtaagcggccttggtctggacaacaatttcggcgttaggcccgaggttgccgtttaaaataaaatgcatgttgcccggaatcgcatcttggagcggttcttgccagaagagacgcgggtgcttaacggctgccccgagcttctggacgacaaacagcggcgtggacagggagttaaagttaatttggcgaatatccaggtccgcttgctgcaggtagtaagcaatgatctcagtctgattgttgaagaatcgtggctggccgttaggttggtagtagaccagttggccggtcaggtggttagagacgacaatttcttgaccggcccgggtcaggtaggtggtcagcgtcgggtgaccggcttcatcgtagtcggtcacggcgtgcttgaagccccattgattgtagtgatcaaccacccggactcggccgttgcggtcaaaccattccaccgtcttgaccggtcgggagttatcggtcgtggcaaaggtaatccgcccccgttggatccccatgtccattagcttgccaccgctgctgttagcttcaatcgcccagtagcgcggcaaatcaatctggttaaagtagcgcggtttgccgactaattcttccccggccagctgtaggtagtacttcagcggggaagtcacgtcgtcaggcaagaaaccatcatcgtgcaagacgaccgtcgggtacttttggccagccaccaactgggaaaattgcaggtctttgctttcgactgtgtagaaatcaaataaattaatcatccgcttgcacctctttcaacaattgggcccacttggcctcaatttctggttccaagtagtccgccgccaggtcataggacacttgttccgcccgttctaagtctaatttagcaaacagggctgctaacgtcgtcgtcaaagcgtggatcgcttgctcgcccgtttcgccgatttcgtacggaatcaaataaccattttcgtcgttgcgaataaaggtctgatttccatagcggacgtcaaagccaatcatcgccagtccggaacccacagcttcaagcaaggtcagcccaaagccctcactggtggaagccgaaatgtaggcttggtagccttgataaacatccgttaagttctggtgtccctttaagtggatgtaatcttccgcttgcccgtccttaatcagctgttgcaacttggcccgttcgcccccttccccataaatatcaagggtcaattgcgggaattgggccttggcggccatcacggcttggactacccaatcgaggtgcttttcccctgccaaccgcgaagccgtgatcagactaaacggccgccgcggcgtggttgggtgctttaattccagcaaactgccgaccggaatcgtaaagatttgcgggtgggcctggttgtacttagcaaattgggccgccaacagctcggtctggacctgggtggacgtgacgtagaaatcaatgtcgcggtggtgctggaagacatactcgtagtagttgttccacaagatatgatcatcattggtgttattgacgctaaagtgctcagcgtgcacgacgctgccgaccttggctggccccttgtgggctaagatttgttgagccatcccggtcccccggtcgacgataatcacgtcccccttctgcaaggccaaccgttccaaaaaggcggtgatcaattcttccttggacaataacagttgacccggcaggcggaaagtcgcgttatcaccggtcggtaattcttccatcgccacggagccgtcctcattaaagaagcgccgcaccatcagcttggccttaccatcgatcggggcgtaatattcgctcatgtagcggccgtagctaaagaaatcgcggtgaaagaggttgccgctgcgcacgtattcggcccgcaggacttgctcactgccagcgcaccgtaaaatggcccgcacgtagtattgatcattaaagatgtacgtcaccatgttgccttggcgttccactttcgttggttgctcggcaaaggtcgcggttaaatcggccaaagtgtaggtcgtcggcgcaattttaaagtcactaaaggcttggtagagccagatgacttcttcatctttaaagcccaggttggcggtatagtgctcaatattttgggccgaaataaaatcagtaaagataaattttgcatccacccctaagtgatggaagacttgggcccggtaagcctgggcgtattcgaccccgctgctggcccagccgattccttggttaaaattataaacagtcatcataactcctcatttcactacttgatccatcacaactggcgcttggcgcaaaggttcaacgtcaaacccctagttgctgagttggccctaacgcaagacgctcatcaacgaaataatgacccccataatgacggagagggcaatcaaaaacatcaatttttgttggaggttaaaagctttttcttttttctgcttcgtgggcttgaattgctccttggctaaccggttggcgatgtcgctggtcaacgggtcgtcatgcttttcgtgctcatgcattggtttttccctcgcttcctagacaaagtaaatctgcttttcaccctttttgttgacgtcgatcgtactcatcaacaagtggcgggtaatccggtgatacaagtcgtggcgcatggcgttatatgaacgcagggcttccttgtgatattcatacaagggattccgctgggccgtcgaccggctggtcacaatcgtttgcaattgggacagcccatcgatttcttccacccagcactcatcaattgcttttagcaccacaatccggtaaaaatcattttcttccttggtgtccgcaaaagtggcctgcttgcggcctaactccgcgcgggcaatgttcatcaggtagtcgacgaccgtggtttgatcagttaggtctaacgtggtcggccgtgcaaagtactgataagtcacgttatctaaaatatagcgtaccagttgatcgaccgttaaagccgggtgggtggtaaagaagcgggtaaactcagcttgcaaaatcgcggctaaatccaaatcgacttgctgatgatacaagagccggttgcgctcgccaatgatcaactgccgctgaatctgagcgctttcgtccatttccaaggacttgcgccgctgctggcggtcggcactatcactggcttcttgggcctgggcaattgcgcggcggaacttccgggtagtaatctcctcggggtgggccggatcagtttgccgtcggcgcttcttatagtacttctgcaaccagcgggccccgtgcttgattacgacttggtcttccaaggaaacgtaaaattggctggtgcccggatccccctgccggcccgcccggccctggagctgctggtcaatccgcttgctggccattttttcggtcccaatcacggctaaaccacccaactccttaacgccgggccccagcttaatgtccgtcccccggccggccatggtggttgcgaccgtcactgcccctttttggccggcttcagcaatgatcgccgcttctttggcggcatttttagcattcaagacactgtgggggattttttgttgcaagagcaattccgaataaatttccgaaacttccacgttggccgtcaccaagagaatcggccggccactttcgtgcagccgcagaacttcttggagggaagccattaacttttccggcagggtggtatagaccttgtcgggcaaatcaacccgcgccaccgggcggttagtcggaatttgaatgacccgatcgtaataggtctccagaaattccttttcggccactttccccgtcccggtcatccccgccagcttcttaaacttacggaaaagattttggtaagtaatcgaagccagggtccgggtatcgggcgaaattttaacctgttccttcatctcgattgcttggtgttgtcctgcttgcagtttcattccttccatcacccgaccgttggcccgatccaaaaggtctacttcgccatcttgactgacaatataatctttatctttttcaaagagccggtgagcctttaaagctaagtttgttgctcgtaataattcagtgtgatgaccattgaataaattcttaaccgcaaagtagcggctcatttttttataacctaggtcagtaaaccaaactgcattttcctccttatcatatttgtactcttccccttccttaagggtgtagatgaattcatctgctactcccaaccaagttgattgtacccgcggtgaacctgaaatcaccaacggcatcaccgcgctgtccaacaaaacagcatctgcttcatcgacaatcgcataattaaaatcacgcataaatttattttccacactagttgctaaattatcaaatagataatcaaaacctagtgttgcattagtagtataagtaatatctgccgcataggcactccgcttatcttcgttggtaaactctttcgatcccggcgcagcaaaaccaactttacaattcaaccctagccattcataaactttccccatttcagtgccatcccggtaagccaggtattcattcggagtcaccagcatcgcccctttgccgcttaagccgtttaaatacaagggcatcgtcgccgttaaggtcttgccttcgcccgttttcatttccacgatattaccctggtgcagggcaatgccacccatcacctgcacatcgtacgggtacatccccagcacccgccgatcagcttcgcgcactaccgcaaaggcttccactaacaagctatctagggagtgtccgtcttttaactgctgcttaaatttccgcgtataatccttcagttgaccatcactcaaggccgccatctgcggtgccaactgattaatttgtttggtaatccggcgcagcttttttaatcggacccggtttaataatggcttcttcattactctttatcttccttttttattaatttctgcctactaatccagatattgattcaccacattaatacgacgttcttgttgaatggcattgtaaattaattgctgttcataattgacgatagcgctcaaactctcgtcaacgattgcatcttccacgtcttcgtcatcatcttctgctttagctatttttacctgttcagctacctggtcagtcacatcagttaaatctagtcggtggaaaattatctctgtgcagccagcgctaaccagctcaacagcataaaagtaagcggtcggttcaaaagtaaagatcccactatcttgacgtatgattgccatcttcaccagcttgccttcataattaaacatcaagactcgcaagtataatccctgctcgtaattgctttcggctactaagtggagctggtattgatgattgtgttctaaaagtggcaactggggtaccgcatgggcagttgcaaagttaaatagttcatcccagtggtaaatagttgagccagtcggtaaaaagggattccgtaactgaacatggtcctgggccaaaaatttaatgcgcgttccatgtaggtaagcatgagtcgccgattgaacagcactaccataatacttgtcggactgataaatctctccccgcgcagcgcctaaaccaacgtaaaacagatctgctggtgacttaatgtagatactttgcatcattgcttcctccggtcaaaatcccgttccatcattgtccagtattgcttttttaaccaggctgccgtttcatacccagcatcattatggtgtccatctagcccccgaccaataacataaggatgtttgccagtttgggctaagtgaactaacaaatcatgatacgccttattatcgtagtcatcttggcgcatataagttaacatcaattgggtttggttgagatcggtctggtcaaatttagaccagaaacgttcgttcatcgtcttaaccatctgtttgcggccagccaactgtgctttccgcgtagtatatttattaattatatctaaagaagttgcaaagccaccataacgaacagattgctcacactgagcaacgtttccaagatttaccaatggtttcccaacaatgatactatgcgcccccagctgactaccataatatagagcaccaaaggttccagctgataagccggaagtattaagctgatgatgatcaaatcctaaccaagccagggttttcaagatccgctctttaatctgagtttcaaactctggactccccaaataaaaggctgtcccttcgatccgtgggtcagcaaatagtaaaaatggtgccccgaatgaacgcatcatataaaaggcttcaaatccctcggccgtccggtacccagaaaagtaaacatttaacggcggtttaaggtcaccagggttaaagtagtaattaacttccgtccgatcgtgatcgataagtcgtcccccacccggcaagaattcccccatttcatagcgtgaccaacggaggtgaacattacctaaagatagccatccttgtcctttagcctcaaaggtaatacaaagacttcctcccggaatcgtatcataaactggcacttgctccgtcatatctttttcagtaaaaactaagcgtttagaaaaagtatacggatttcccggtggtgcttcataaactaccattcgtagcttaacttcctcactatgagaatactcactccaaagcttaagtaatcttcctcgatcaatataaccaccaaaacgataagttcctactggttgatagtcagtgccaaagtcgccagtcaattcgaccgccagaaagccattaaactctaagctaccacgataatttggtgccggttcaaacattgaaggatcaagttttgcccccccttgcccctcaaacagacgagtttgcaaccatttcacaatttgatcccactcagttagtggtaaaggccgaaccactttcgccttaaaatagtcggtttgtaatggcgtttttagttcttttaggaccgcaggggcgcaagtaacacgataactgtcaacatacttgaacagagcttgtaaatctacatctgtcgggcaagctgcaaagtaagcccccacgaaattttgaacccgtggcttttcgacttcgacaactggcttttttttctttaactggttagtcgcctctttcgtcactggcttttttgaagataattttggcttaggatttaaatcagctaacaaggatgacactgcccctggtgcggcataatgccactgatgatctttgtcggcaggtaactgtgctgttaaatcatttggcccaattaataagtaatgttccactttactcctccgcctttttcaatgcaacttgaaaccgcttgacaatccgaccactagtatagtccgcaattttattggctgcatggaccagcgccacgttccaatttttcaagccatctaaataaaagtgtaaggatggcccaagctcattttcaacatcatcaatgcggcgcccattcttcccttcctccacataaagcgattcagcccttaaaatttcagggatcccggcactaatcccggcaatctgtaaaaatacatctggttgagcagctaaatcaattatgatacgagtagtatgaatggcttgaattaaatctggttcagaatttacaacgaccaaatgaatatcacgcttacgttcattattacgtgcagcatcaaggtcatcagcaagttggttttcggccttagaagcttgtacttggttaaaagtatattcatcttcaagatccaagtttttgtctaattccgctactaaacccgcgatttcatcctgacgttgaaaatcctggaaagtaaggagcgttaaatcaatcaattcattttcattcatcatagtcatgataatccgtaaacttttacgtaggagaattggatctactccgtcaatagcgaacataattttcaaaagccgctcctggttgctgatgccaagacttaatcttgtatccaaaggtggcagttgtaacacctgagcaccaaccttcgtcagctgctctcgattataattagaatcagcgatcgttaagactgcacgctgtgccatctcagcttcaatctgttcttctaaattagcccgattaccaaagtaagacaacactacttgatcattgggaagcacatccattagcatttgatcatgaaatggatcggcagcagcgattatgacatctttagaatgaatttgttgctgactaaatagagtgaactgctcgataattaaactcctcaggttcggatagaccccctgatgctgagcaaggtgagtgcctccaacaatatgaactttcccgtcagatgccacgtagaattgttcattaccgttactatccaagtaagcctggcgttggcactgttgctgatcatcatattcgctgactcgcgaaacaaagccgcgatcgtcaaagtccagcttccgataaaggcggtcatctttaaaaagatccatcatgattagattgccttccggtcccattgaaagctgagcataacgttgggcatggctaaagacagtcacggtaaaggggttgtagacgtaattggcgtcagcaggccaggtaaagtcgtggtaatcaaggttgaccaccgataaatcggccggaatcccctgtaagtagtcaaagaccgccaagcgcggcacttcgtaaatcccctgctggtaggcaaagtgacggagattaggaaagtacaccggaaccagtaaggcggccgtttgctcgcttcgagtaaacatccgaacctggttgatcgtatcgtcaaagccgtgctggttctggcggaaccaaatttgttcgcgactgtcccaggattgatcgccccggtaccaagcgggtaaaaagtaatacatcccttctacacctcctttgcgtggtcaaatagcggccgatactgcttgcgaatcgataagatattgatctgatcgatcatccccatcgaaaaaccaacgatcatcaagacgtagcccggcaacatatagatccccaattgtccggggtggctgacaatcatcaacattggcatcccagcaaagataacattgtaaacaccgcccacgaccccaaataagagggtaatcaggttgatccgccgctcagtcgccttacccggccgtacgcccagcaggtagtcgccggagcgctgaaaggccttggcctgctgttcggcattaacgttaaccagcgcaaaggccaaggacaggataaacagcagactgatgtagaggatgattcccggcaacttggtaaagccaaaactggtcgccccccaagccaaccagtaattttggggataaaaggtcaataagaataaacaaaagtaagtgggcagtgtaatcatcgacatggcaaacatgatcggcatcccgccggcggggttaatttaattggcaaatacgaacgcgaagcataattgttatcaatcataagacgcaccaagggcaaacggtattccccccggtcagccataacattgaggtaagcaaaaaggaccatgatgatgaccagggcggcgaccaccaccattagacgggtcgtggaatgatcggctaacatcaaaatccccgctaatcccgttttcatcgcactctgcaaaatattggccagtaccaagagggtcagcccaccaatccctaacagggcgttcatatttgacagccacatgataaacatcgtcccggtcgtcatggtcagcaggaccgcccctttcgccgcccagcccgtctgggtcaattgcatggaactgaccaggacaaagccttgaattaccgttagtagtaaggtaatctctttgcttatccaatccttgcgccgctcagataagcgatccatgccaaaccctcgtccctgagtcaataaattggcgatgatcatcgccgacatccacggtgaaagccccaaactaaagagcgaaagctgggttaggtccccccagtcgccaggctggccacgtgcaaactggcattttttaccaccaacgatttggcatcagtatatggaagaggaatcgacttccctaaaatgaagataaagacaaacaataccgaccagcaagccttatgaaagaccgggtgattgaatttccatttttgccaagtgtgcaccgcacttcccccatttcatcgaacaatgtttgccactcagattctagctgttttataatacaatttcaataatgcaataatcaaaatagcgatcatatttatatgtttgctaaaaaaacagcatcgataagggcgcgcttggtaaagaatccatctcgaatcatatttcctatgcgattagcatttctcgataatgtggcatactgttcatcactaatttctttcactttttccgctgcttcctctaaattagcaacacagtaaccaatgtgatgctcatcaatgaattcactttgcgccaaattatttttaacaacgactggtattccggacgctaagtacgtactcaattttgatggagcatccattgtcatatattgctctgtataaggatcatctgtccaaactaagccaaacccaccgtttcgttgcaaactttccagaagtaaaggatcaattttataccctatagcttcaacgttttgattatctatttttgcgtcagtataaacttttaatttcacttttaatttcacatcgtaattccaacttttaataaaggtaaacttatcaggatttccggcaaaactaattgtatgagaatttttgggagagataaatggggatatcatacctgggtggtcccaaaattgctgataaatcactggaatatcttcttttaagccatcttgccttaaacgttcaatcaatttaacagacggagcaatcagtacatctgctttattgaaatattgaatgtacttaggcatcaaatacaggttcgcttcaaacattaagggaagaacgtcttctataaaaatgacttttttcaccccgttatacagtgagaccctatcaactaatccgatatcccaatcaatcgaattccaacttggcgcctgaaagattacagtatcgttatttgctaatccggctaacatcccatcaaaccgtccgtttcttacttcgattggttcatcaggccaatcataaaaatacattggaatctctttaaagtgtaaatcatgacacgcgatctctgctaccgtattttgagcttgttgtgctgtatttacgtagttaaggccatggatgtttgtaataaagactgtcattttaacctcacttaatactgtatagcttcacctttatctccattcaagattactaatcatttcaaaagctgccctcttaattggaaagttttgcctaatcaaattaccaatctggtgagttctctcgagcatttgatcatactgttcttttgttattgacctcatagctacctctagctttgataaatcacctaatgccaaaccaatcccatgctctttaacaaattccgctaatgctgattgcttagcaactattattggttcgtcagcagccaaatacatagctgctttgtaaggagaattatacttttcatactccccgctccatcctgttatttgaggataactggtagaggcccaacatagtccaaagctcccagatagaatgctaggaattgcttcatgatcataatttcctcgataattaatgttagggtagctattcgtcgttaaatcatgcaagacattgtcggtctccacttcccgtccaaaaacgttaactgcaatggatgatggaatccccagtaaaaatcctgctttagtcaggttacctgcgaaatcgatttctaatttcaaagggcgtttccaatccattgaattcttttttgctgaatatccaaatacatccagatagacaaaactattactgtactctagtccggcaaaatcaaaatccccctgcaaacgttccgccatttgatgattatgaacgattaacccatccatttttgataaaaagtaatgttcaacaaacgaattactatgatgatctgtcaacatttcccgtgcttctttaactgatttttttccttgccatgaagtaatatcatgaataatcgctacacatttggcaccaatttgattatgaaggtaatctatcaaatagccagtgtatgcgtttgaattgtgcaccggaaattgaaggaaaacaatatcatctttctttatccccgccagttgaccatcaagccttgtttgtagtgaactggcaggttcctcatcccaaaaataaatgtaatagtctaaagtacgtgcattcaacgcttgtactaaactctctgttacttcatattgcggccgaccaaaagccgtattatcccaatatgggacaccattttcgcggctaccattactgctcataacccaataattcataatttgcacatctccatatatagataataatgatcttttagtagaaactcaaattgtagagtgttttacctctagtgatgcctaaacaagatatcaactaaattgatacgttagttatattttttcaaaaactatgactctatttgatcccaatagattggcatgacagccgttgtactactaaaaacgtacatataaaggtcacgcacagctgcaatcaaccgatcactggttgcatctaactggttaaatagttgatctacgctctcgtaaagaatcgtgtcgttatccaaatacaacacatgctcatagtcagctaacaccactggcaaaaaaattcgttgtaagtacaaaagattaacgtgatcttttacttgcgctactaattctgatggtagttccaccaaggcatgcggtttgacgtggacgtgcggttcaccaactaccgtgggtaattttgctaggaccttcaaatcttctgtaaccacctgttcgttgaaaatgtaaatgtctaaatcctcaattgacagatagtttttttatcaatgatatcaaggaaacgcttaattacttagtgtaatttcctgagaccacgtaacaaaccgcatttttagattccatataataaagttcccccaatcttcgtgttattagataaccccagttaaggtaccatccccatcactgctttttactcgctgccttttccaaaatccgcaaacgttgcatcacgttcttatactttaccagattggtgctcccactctttagcagttcatcacggtgcactcccaaccgccaacggtaagccttcaattcttccgttatatccatccccagcaaagccatcattgtaacccgctgttcaattgcttctagtgggtagacgttggcttgactcgtttcccgggtcacactattggtccgctttcggtgcatgtttaggggcttattcataaaggccagccggtccgccaataaataaacttgccaggtggtcaaatcatcttccacggcccggtcggtcgggtaggcgatctggtcaaacaattcccgcttgtaaagcttacctcacggcaccgtaaaacactagctcaggttaaaatgcatattatactcttcggcaaaccactccgccggggtatagaccttttcatagtgatcttcctcgcgcacccgaaaatagaatgtttgcttgtcttcaacaaattcataaaaattaccgattgcaacatcggcgtgatgacgttgcattaaatcaaccaattcggctaaattggtcggttccatccggtcgtcattatcaacaaaggctagtaactcgccggttgccatcgctaatcccgcgttccgactgtcgccaacgcccccgttgggcttatgtaagacccggacccgggaatcttgggcgcggagttgctcacaaagcgccgcactgcggtccgttgaaccgtcgttgaccaaaatcacttccaggttttggtaagtctgatttaagaccgagttcacgcaatccactaaatatttttcgtcattgtagaccgggataatcaccgaaaccatttgcgctatttttccatctccacttttattaattacaatgttaacaaaaattccttattttataccattagctgtaatccatatcaaaaccatttaagttatcacctaattccagcaaaagttgtcgtgaaaaaaggtttccccctaatcgacgaaaagaatcgtaatagcggataaacaacataaaatttaagggcatcaatatcccagcaatttttggagaaggataaataaatttgccgtccttaagagctacaaaatttgtaaacaaaacatcattatttcctttttgacgagtattcattaacttagtaaccgtatccggcgcagctaaaaagtcctctgcctcaataaaaaggatatagtcgccgatagcttgcgcaagcccaacagtttttaaattctcccactttttactactattttgcaatcggtcattggtaacttcgtagcaatttctggatcgttagaagctacaatcacttctaaatctgggtaatcttgttctaaacaggtttcagcacatcttttcagtccgttctccgtcccgttagttaaaattattaatgatactcgcaccacgttagtcctccctcgtaatatttacccgctgcttaccctcctacatttcttttatcagcttccgcacataacctgctaaatcctctggggtaggaaaaaacatggcttgattattttgataatcctctcgttgtaacgccaaaatcggtttaccagtcgcaaaaaaacgttcttgcacactttcatcacgttggatcagtgttaaatccaacattgctacactggtatcaattaattgcgttaatgctgctggcaagatcgtctgatgcaaattaacattcggataagctactaaacgctttaactcaaaactcataaaaacaggagaagcaatctcaaaatcaacctccggcaaaagcctaatcagctcctccaattgatttaattccgcccaagctgtatacaacaatagtttgggtcttactgatttgcttattacgcttaagtgattaccaatcatttgccattctaggttgtgatactcccaccattgcatacgtccgcgcacagttgacaaaaaattccacggtttgtcactacctgtatagtgatcaattaccgcatcattcactactaactgatcgtacgggggccaaccaaactgttcgccaacccgttccaggccaagctgattgttgaaacgagccggtaattcagtaatcgcaccttcacaaacgcgattaagaactgtttgatcaccattatcaatctcattttcatggctagagaaaaaatcgatgcaacgacgagttaaatctgctgtctgccatcgttcataatcaatagcactcctgtgttatacggtgcacaattgatttcatgagccatacccaccggttgcccttgtaaatcgaattttaataatggccacagactatgccgaacaatcacatcactatcgagatagagaattctctttgcttcaatcaattgcggcaggtagattcggacgtaactgtatccattaatgtgttgccacgaaactttgccaatcgccatttggttaagatcaatttttaagtcatggagctggctccctactggcgacaacttttgattaatattccgaaaccattctggtggaatatccatatttgctaagtaaacatggacattaggagtatgataaaaaattgattttaacgtcgtttccaaggccgttacatagccatagtccgcagccaaagctactacataatcgtgcattctttccctccaaattcacttactacttaactaataatttttctaccacttccaccaacatccgcttaaacatatagccattgcgcaacaaatagccatagtccttagcattttgggccatgcgctgatagtcttcggccgtgcaattttggaccagctggtcagcttccgctaaactttcggctaacaaccccaaatggcggtccttaatcaattcggccgcggcaatgtcagcattggccactacgggtagccccgctgccaagtaggtactgagcttataggacgcattgaggtgggaatattgccgttctggctgttccggggtatcgatgctccagcacaggccaaagccgccgtccaacattggtaacagggcgctttcgggatggaacccgacgtagtcaatgttttggtcgggatcggcctgggcatcagccgcaaataaccgcaagcgggtctgataagaccattcccgggtaaagggaaagcggctttgactgcctaaaaaggtcagttcccgccgaaacgccgccatttccggttggtaagtggtggggtgatcccacaggtgttggtaaacgatattatcaaccgtgagtccctcggcccttaagcgcgcagccatattttcacttggcaaaatcaacaggtcggcttcattgaaaaattccacgtacggccgcatccagtcagcataattttggctaaacatcagcggcgggacgtcttgaatgaagaaaacaatccgcgtttggtaaaggcgcagctggttgaggtactgccgctcgaattccagcccgttccacgtcgggagctgaaagatcacaatatcacccatctgcaaagaggcattgatgccgtcgatgcgcacccggagttgttctggcgaatcactggcgacattatagcgatagatggctaattcattagccccctgatccttggccagctgagccgttacattttgtgccgcttgggcggtactggtattcgccatgccgtagaggttggtaatattaatcttcatttggttccattccttcctgactaagatcggcgacaatctgggcggcatatgctggcgccgcgggcaaagtaatgtcttcagcaaagttatgttccatcgtgtgcttatggctgagctttaccttgctggtcgcccccatctgaaaccactcgtattcggaatcaatgtagccaatatccactaattgcatccccgttaccgccaattcgccaaccaaggctttagcagttgggccaagcatcaataagaccagcttgccgggcccatatttttttaatcgcggccttgagcacattgtactgagcaaaggcattatgcgcggggccaagaatccgctgcaccgacttggcattggcaaataaatcattcctcacccccgaccgggacagctgcccttcgacaatcaagatgtcgcggtcgtcccatagttgccgcagcttcgcaaaatagccctgggccaagcgcttgtcttgccaattcatgtagggacgggaaataaaggtgttgccgtaccagtcgacattggctcccatcaactgataaattgcggcgttggccggccgattctgagcccaaaaggcctgcgctgccggggtgtagcgttctaagtggctaaagacgtccgacatgcacaccaccagctccgggtggctcggcgtatacaacagccgtttcaaacgttctactagcgctgggtcgtaaacctggtaaggaatatcgcgtcccgcaatcaggtcaatctcgccatcaccaaagcgagcgactgatgaatgatgcgccaaaatataatctaaggtttgatcaatatccttgaccgtgaccccgtaaagcggctctgttgccatcactatcctccgatcgattaattgattagttactatgataagtagtcgatcagcgaaagtcaatcggctttcgccaaccaatgacaattcctctaaattgtctcacaatttagctaacgctttcattcaaattttacacccttttttccgttgttacagcaaatccccccatcgcgcttatcccaaagaaaaagcctgaaccctaaatggattcaggctttttgactggcaaacacgcttatttatcgttatgatcccggcgtttcttgcggccgagcaagccggctagcaagatgcccaggccacccagcaggccagtagccggggcagattcattcccggtttgcggcagcttttcaacggccttgccggtcttcgttgcgctcgggtcaactggacgtgctaagttgacgtagttatccgtgttcgtcgtcacatgcgatcccagttggctgattgattcagaatcgtacttcgccaaaccgtcatcagaaagactggtcgtctgtgaagttgatactgattgggagtcaaccttgtgactgtctgacccactgtgacttacagactcacttgcgcttgttgatgcggattcgctggcactagtagaagcggattcacttgcacttgtagatgcggattcacttgcgctcgttgatgccgattcgctagcactagtagaagcagattcacttgcgcttgttgatgctgattcacttgcgcttgttgatgcactttcactcgcactcgttgaggctgattcactcgcgcttgttgatgcggactcgctggcactcattgatgcactttcacttgcacttgtggatgcggattcgctggcactcgttgatgcactttcacttgcgctcgttgatgccgattcactggcactcgttgatgcactttcgctagcactagtagaagctgactcacttgcacttgtcgatgccgattcgcttgcacttgtcgatgctgattcgcttgcgctcgttgaggctgattcgctagcactagtagaagctgattcactggcactcgttgaggcactttcacttgcgcttgttgaagccgactcacttgcgctcgttgatgcactttcgctggcacttgtcgatgccgattcacttacgctcgttgaggccgattcgctgacactcgttgatgcactttcacttacgctcgttgaggccgattcgctgacactcgttgatgcactttcacttacgctcgttgaggccgattcgctgacactcgttgatgcactttcgctggcacttgtcgaggcactttcacttacgctcgttgaggccgattcacttacgctcgttgaggccgattcacttgcgcttgtggatgcggactcacttgcactcgttgaggcactttcacttgcacttgtcgatgcagattcgctggcactcgttgatgcactttcacttgcactcgttgatgcactttcacttgcacttgtcgatgcggattcacttgcacttgttgaagcggattcgctagcacttgtcgatgcggattcacttgcgcttgttgaagcggattcgctggcgcttgttgaagccgactcacttgcactcgttgaggctgattcacttgcactcgttgaggcactttcgctggcgctcgttgatgcagattcgctggcactcgttgaggccgattcgctggcgcttgttgaggccgattcgcttgcacttgtcgatgctgattcacttgcactggttgaagcagattcgctggcactcgttgaggcactttcgctggcactcgttgaggccgattcacttgcgcttgttgaagctgattcacttgcacttgtcgatgctgattcacttgcgctagtagatgccgattcgctggcactcgttgaagcagattcacttgcgcttgttgaagccgattcacttgcgcttgttgaagccgactcacttgcactcgttgaggcactttcgctggcgctcgttgaagcagattcgctggcactcgttgaagcagattcgctggcgcttgttgaggccgattcgcttgcacttgtcgatgctgattcacttgcactggttgaagcagattcgctggcactcgttgaggcactttcgctggcactcgttgaggccgattcacttgcgcttgttgaagctgattcacttgcacttgtcgatgctgattcacttgcgctagtagatgccgattcgctggcactagtagaagcagattcacttgcgcttgttgaagccgattcacttgcgcttgttgaagccgactcacttgcactcgttgatgccgattcacttgcacttgtggatgcggactcacttgcactcgttgatgcactttcacttgcacttgtggatgcggattcgctggcactcgttgatgcactttcacttgcgctcgttgatgccgattcactggcactcgttgatgcactttcgctagcactagtagaagctgactcacttgcacttgtcgatgccgattcgcttgcacttgtcgatgctgattcgcttgcgctcgttgaggctgattcgctagcactagtagaagctgattcactggcactcgttgaggcactttcacttgcgcttgttgaagccgactcacttgcgctcgttgatgccgattcactggcactcgttgaggcactttcacttgcgcttgttgaagccgactcacttgcgctcgttgatgcactttcgctggcacttgtcgatgccgattcacttgcgcttgtggatgcggactcacttgcactcgttgaagccgattggcttgcactagtagaagctgattcactggcgctcgttgaggctgattcgctggcgctcgttgaggctgattcactggcactcgttgaggccgattcgctggcgctcgttgatgcagattcgctggcactagtagaagctgattcactggcgctcgttgatgccgattcacttgcacttgtcgatgcggactcacttgcactcgttgatgcactttcgcttgcacttgtggatgcggattcgctggcactcgttgatgcactttcgctagcacttgtcgatgccgattcacttgcactcgttgatgcactttcgctagcactcgttgatgcactttcacttgcacttgtggatgcggattcgctggcacttgttgatgcggactcacttgcacttgttgaagccgattcactggcgctcgttgatgccgattcacttgcacttgtcgatgccgattcactggcgcttgttgatgcggactcacttgcactcgttgatgcactttcacttgcacttgtggatgcggattcgctggcactagtagaagctgactcacttgcacttgtcgatgccgattcactggcactcgttgaagcactttcacttgcgcttgttgatgcggactcacttgcactcgttgaagccgattcgctagcacttgtcgaagctgattcactggcgctcgttgatgctgattcactggcgcttgttgaagccgactcacttgcgctcgttgatgcactttcacttgcgctcgttgatgccgattcactagcactagtagaagctgattcactggcgcttgttgatgcagattcgctggcacttgtcgatgccgattcgctagcactagtagaagctgattcactggcgcttgttgatgcagattcgctggcacttgtcgatgccgattcgctagcactagtagaagctgattcacttgcacttgtcgatgccgattcactggcgctcgttgatgccgattcgctggcactagtagaagctgactcacttgcacttgtcgatgccgattcactggcactcgttgatgcactttcgctagcactcgttgatgcactttcgctagcactcgttgatgcactttcacttgcgctcgttgatgcagattcgctagcactagtagaagctgactcacttgcacttgtcgatgccgattcactggcactcgttgatgcactttcgctagcactcgttgatgcactttcacttgcgcttgttgaagccgactcacttgcgctcgttgatgcagattcgctagcactagtagaagcagattcacttgcgctcgttgatgccgattcacttgcgcttgtggatgcggactcacttgcactcgttgatgcactttcacttgcacttgtggatgcggattcgctggcactagtagaagctgactcacttgcactcgttgaagcactttcacttgcgcttgtggatgcggactcacttgcacttgtcgatgctgattcgctagcactagtagaagctgattcacttgcactcgttgatgcactttcacttgcgcttgttgaagccgactcacttgcgctcgttgatgccgattcacttgcactcgttgaggcactttcacttgcgcttgttgaagccgactcacttgcgctcgttgatgcactttcgctggcacttgtcgatgccgattcgctggcactagtagatgcggactcacttgcgctcgttgaagccgattggcttgcactagtagaagctgattcactggcgctcgttgaggctgattcactggtactcgttgatgcactttcgctagcactcgttgaagcactttcacttgcgcttgtggatgcggactcacttgcactagtagaagcagattcacttgcgctcgttgatgccgattcacttgcacttgtcgatgccgattcacttgcgcttgtggatgcggactcacttgcactcgttgatgcactttcgcttgcacttgtggatgcggattcgctggcactagtagaagcagattcacttgcgctcgttgatgccgattcacttgcacttgtcgatgccgattcacttgcacttgttgaagcagattcacttgcgctcgttgatgccgattcgctggcactcgttgatgccgattcgctagcactagtagaagctgattcacttgcgctcgttgatgccgattcacttgcacttgtcgatgccgattcactggcgcttgtggatgcggactcacttgcactcgttgatgcactttcacttgcacttgtggatgcggattcgctggcacttgtcgatgccgattcactggcgcttgttgatgcggactcacttgcactcgttgatgcactttcacttgcacttgtggatgcggattcgctggcactagtagaagctgactcacttgcacttgttgaagccgattcactggcgctcgttgatgcactttcacttgtgcttgttgaagccgactcacttgcgctcgttgatgcactttcacttgcgctcgttgatgccgattcactagcactagtagaagctgattcactggcgcttgttgatgcagattcgctggcacttgtcgatgccgattcgctagcactagtagaagctgattcacttgcgctcgttgatgccgattcgctagcacttgtcgaagctgattcactggcactcgttgatgcactttcacttgcactcgttgatgccgattcgctagcacttgtcgaagctgattcacttgcgctcgttgatgctgattcactggcgcttgttgaagccgactcacttgcgctcgttgatgcactttcacttgcgctcgttgatgccgattcactagcactagtagaagctgattcactggcgcttgtcgatgccgattcgctagcacttgtcgaagctgattcacttgcactcgttgatgctgattcacttgcacttgtcgatgctgattcacttgcgctcgttgatgctgattcgctggcacttgtcgatgccgattcacttgcgcttgttgaagctgattcacttgcgcttgttgatgcggattcgcttgcactcgttgatgcactttcacttgcgctcgttgatgccgattcgctggcgctcgttgatgcactttcacttacgctcgttgatgcactttcacttacgctcgttgatgcactttcacttacgctcgttgatgcactttcacttacgctcgttgatgcactttcacttacgctttttgatgccgattcgctggcactcctcgttgaagcggattcgctggcactcctcgttgaagcggattcacttacgctcgttgatgcgctagtcgaagtactcgtcgaggtggattcctgttcactcttactcgtcaattgacttggaatcgtcgaatcaactgaatgagtatcctgatcgtagttgtagacttcttgaccaaccaattgaccttgcaagtttttccaagtatcttgccaagagttaataattgcataaccaccagaaaatgccccattataatttcctgctgcaagattagcttggtcagcattactatgttgagtcgtaaaggtaactgtaaaagaagcattcatggtgttgttattatctccccaagattggaaatacatagccgtcccaattgtgtccttattgaaaccagtggtaaatggtgctgtgtttaccacaatatctttggtattttgtttgtctcgtactgttgcttcatcaaattcattattataagcaaaagaataaccaattttatcatctttatagcttcccttgcccgaaaagaccgagttatcaaagtcgctatttgacatatgccaaatatctgcataccgaccatattgatagaaatcattcttgacgtcactaattactccatttgtcttattaacgttctctggcttaaatgtgatatcattttctggattgacatcccctgaattgagatcacttggcgattttcgtaccttcagaccacttgttagtccattattacccaaatggctgtaagtcgttcctggttgtaagctaatatggacattcacatcgctaatgattttgtaatccttagttaggtaaaaacccatttggccatttctcaaaccataattaagaggattgtaaccttcataccatatcccttttttaggatagaaggtaactgtccactcggtttttccattacctaggtcttttgtctgtatattaacgttgttcttagcataatcagtagtttgaccagtatcccgagtagtataagcattgatatcccaccataatcggttgtttttatctccggcaatccacttgtatttatcgttgccattacttccccaataagcaggcgtatcccccggtttcgtattggtatcgggcgtccccaaccccgagctggctgggatatttgccaacaccattgtgcccaattggttgggctcgaacaccgtcatcaacgattgcaattcactcaaaccatggctggcatcactttcactgacttggttcttggccaagacgtcttggtagtgcgcaatggccgcttggtaggcttgctgatagtcgctggccgcatttttgtaactgtccgtggccataaaggtattcgcctgagctaccagttgctttaatcggtcaacattcgacgtggtcggcgctgtcgtatccaccaggctgttcgcattaatcgtttgactggttgcactcgtggccgtccccgacatcgtttggctggtggtactcgtcgtgctggccgattccttgaccgaagtcgaattgctggttaaggacgtactggtactcgtggcggacgtcgacgtgctggtttcactagtggatagtgagcccgaagtactggtcacttggctcgtagtgccttgattgttggaggaagtcaaactaacttgatcggtatttgccaaggcactgttcgcggcattattcgtggccgtcgtttggacccccgtggtcgtggccgccaacgctccggttgaagcaaccgtgccgcccccaatcattgccccggcggctaagacccctttcagcaaggtcgccgactttgaatccaagttcgcttctgattcatccaattgcaccttgtgtggtgccgaatgcgttgcgatctttagtaaacccacccgggttaacaaacattgcacccattgcttccctgacttgtacaattttacccgagtagtccgggagctttcggtgatcgtttccttttttgtccgtttcaagatcccacgtcctttcatttctttatgtacgcttctagtcagttgccttgcgctcaatatttatcaattgattaacccgtcctgcgacgctcgtcccaatttcaaacatttccgctaatcaggttaatcgcgagataaccatttctattatcactataagcactttattcattcgctttcatcagcttttcattgatcatatttaaaatgcttaataggtgttaaatagatagtaatcttttttcaacatatttatcaacgggatattaaaaaaacttacaatttatttaaatattaatacctactgagtgatcaatatttataacttgaatcataattttgagtgctttttctcccgccacagccccgagtcttagggggccattgcgtcaatttatcaatggtctaggtggtgttttcaccactcattagcttcatcatcttgttatgtaggaatggtctattttagcttatgataatttataatttttcgccgggggccggccgaccattaattttgcccttggtaccaacaaccgaatgtattgatcgggttacattttgctcccctggttccgactaaagataattaacccatccccggagtcaaacttgctttggcgcgggtcaaccatcccgtcgacatattttctcatcgaattctcatttaagtcttttcaatcccagcgaaacctgctatgctaaccccactagctgcaaagcatgctcaaacaactggattggaggagatcatatgcgcaaaattactgtgaattcggactttaccttgccagtccgcagtgaaaaacaaatcgccagcaacgttttgaaaggctcgctggggaacctgatcgaatggttcgattggtacgtctacgcttcctttgctatctacttttcgggcgcattctttcccgctcacaaccccacggcccaactcctagctgccgcgggggtctttgcgatcggctttttcatgcggccgcttggttcgttaataatggggcgcctggctgatcgccatggccgccgtacggccctaactatttcagttgtaatcatggcaacgggctccttgatcattgcgttcgtcccgacctatgctaccattggcatctggtcgcccctgattttgattgccacccgcttattgcagggcctgtcgctcgggggcgaatacggaacctcagcgacctacctgtcggaaatggccagtccgcaccaccgcggcttttacgcttcctttcaatatgtcaccctgattgcagggcaactgttcgccttgctggtgcaaattgtcctgcaaagtttctacaccaatgcccaactgaccgcctttggcattagggccatcggggccttggtcattgtgtcggggtacacctcagcttttaagagtttcgttttccttttttagctctttaagcttagactgatttgcttgataatttgcttctaatttttcaatttcatcattcaacttagcaagagtattaggagtaagtaccattcctgcaagcatcttaccttgctgaagagtaattgtttttttggctttgtcgttcacagataataaatattcataattatctaaaaattgacttaatgaaaccatataggtttcatgtaaatgttttcttagcatttaacttgccttcgctttctaaaaatttgttaaggctatttgccttaacaaacttattctaattggcagattgcaagaaataacttgaacgaatttagtgacgtaggttaagcaagaagatctcgattggtgtgcgccagttaagacatttaagtggccaggaattcagataccaactgatttgaaccagctggcgatcgctcagctcttcaatagcttgtcccttgggaataaatcgtcgcaaaattcggttacggttctcattactaccgcgttcgtgcggtgaataggcatgggcaaagtaaacctgagtacccgttagctgttcaattgcctgataattagcgaactctttaccatgatctacggtcagcgtcttgagcttgtcttgaagttgactagctagttcaagtacggcttgagtcatgaactgactgtcgcggccatggagccgtttaacaattgtcaggcgactcttacgctccacaaaagtagccacagcttgacctttacgtttgccagaaagtacggtatcagcttcaaagtggccgaactcctggcgagtttcgactttatgaggacgctcctcaatggagcggccgtgactgaacgtaccccgcttttctttagcacgatgacgacgaattccatgatcaggcaaatcgggtagctgtacatcaagccagccttgatcaatccagttatagaccgtcttgtaggcaatccccaccacatgggtaacttgttcaggggaccacttctggacttgaatcttttcctcaatcaagtgcttaaggcttttagtgagcgaagacttccacccccgttgactaaccttgcgttcaaagtcagtttgcgctagctcagcccggtactcactatttagccggtgaagttcgttaaagatggtggtcttactaaagcctaagtagttagcgatgtatcgcaaggaacgtccttcactaagcgtttcaatgacaacacggttctggaatgataaaatagcggtgctcatcaaggtccttctttctaatggattgtgtggtaacaccattaaagaccttgatggttttttctgtccacttaaatgttcaacttaaattttacaatctgccataaagaaaaatcctcctgtactgaatggtatattttcagtataggaggattggtcgaccgcgcctagacgtgtcgttattgactgcttaccgtttgttggctactaaaaagggcccgaccctaaccgtaattggttagggccgggccctttcttatgcgttgcgcggtggtaaattaattaccttagtcttcgcgcttcttcttcagaccgagcaagccgaggaaggctacgcccagcccactcaacattgcccacgtagctggttggtccccagtctgtggcaagtgttgttgtgcttgttgcttagttgcggtttggttcgttgacgttgcgcccttcgtttggccaccattggtcccaacacctggctttatcgccgagccagtagtcgcttcagtcacgtgcttgtgcaggtttgcctgcagcgtggtcgtgctaccgtccgcaaaggtaacttgtacgttcccggcggtatcaaccgtgatcgtcgcaattggggccgttgggttggtcgtctgaattgcttccttgacttggtcttgttcggcttgcgtcaagtggttcggatcaaccacgttgaccgcttgcccagggttcagtgggtatttatccgcatccgtcttgcccgttaccaagtcgtgacctgaaatcgtattcgtggagccatccgggtacgtgatggtcgtcgtcccatcgtcaccgaccgtgaccttcgtcccatccggcaggttcgagttcgcttcgtcaaccttgtccttaacggcgttcttttcattatccgttaacttggttgggtcatcaaccttcaccttgtcaccgcctggtacgtttggcgtgttcttatcagcgtcactcttgccttcaatgacctggtcacctgggatcgtgtccttcgagccatctgggtaggtgatcgttacgtcaccgttgtcactgaccgtgaccttgctaccttctggcagcgtcgacttgccattctcatccttgttggcgtctttaatggcttgttcaacatcggacttttcatcttccattaacttgttcgggtcatcgaccttcaccttgtcgcccggtaccttcggttcgttcttgtcggcatcagtttggccttccgtacccttaccttcaacgaccttgtcccctgggatcgtgtccttggagccatctgggtaggtaactgttacgtcgtcgttgtcgccgaccgtaaccttgctaccttctggcagcgtcgacttgccattctcatccttgttggcgtctttaatggcttgttcaacatcggacttttcatcttccgttaacttggttgggtcatcgaccttcaccttgtcgcccggtaccttcggttcgttcttgtcggcatcagtttggccttccgtacccctaccttcaacgaccttgtcccctgggatcgtgtccttggagccatctgggtaggtaactgttacgtcgccgttgtcgccgaccgtaaccttgctgccttctggcaacgttgacttgccattctcatccttgttggcgtcttcgacggctttaactacttccgacttttcgtcttccgttaacttgttcgggtcatcgaccttcaccttgtcgcccggtaccttcggttcgttcttgtcggcatcagtttggccttccgtacccttaccttcaacgaccttgtcccctgggatcgtgtccttggagccatctgggtaggtaactgttacgtcgccgttgtcgccgaccgtaaccttgctgccttctggcaacgttgacttgccattctcatccttgttggcgtcttcgacggctttaactacttccgacttttcgtcttccgttaacttgttcgggtcatcgaccttcaccttgtcgcccggtaccttcggttcgttcttgtcggcatcagtttggccttccgtacccttaccttcaacgaccttgtcccctgggatcgtgtccttggagccatctgggtaggtaactgttacgtcgccgttgtcgccgaccgtaaccttgctgccttctggcaacgttgacttgccattctcatccttgttggcgtcttcgacggctttaactacttccgacttttcgtcttccgttaacttgttcgggtcatcgaccttcaccttgtcgcccggcacctttggttcattcttggcggcatcgctcttgccttccaccactttgtcccctgggatcgtgtcgactgaattgtctgggtaggtaatagtggtatctccattgtcacccacagcaatcttggttccttctggtaagccggtgttgtgatcacgaatgttgtcttcgacttctttcttttcgtcattagtcagcttcgttggatcatcaaccttggtcttggctggaaccgttggatccagcttttcagcactagtcttttcttcaaccagctgattaccttcgatagtgtcgactgacttgtctgggtaggtaatagtggtatctccattgtcacccacagcaatcttggttccttctggtaagccagtgttgtgatcacgaatgttgtcttcgacttctttcttttcgtcattagtcagcttcgttggatcatcaaccttggtcttggctggaaccgttggatccagcttttcagcactagtcttttcttcaaccagctgattaccttcgatagtgtcgactgacttgtctgggtaggtaattgtagcttttccatcattagctacggtgacacccgttccttctgggaacttatccttattagcttcaacaatcttatcttcgatcgtcttcttttcatcagccgttaagctggttggattatcaaccttggtcttggctggaaccgttggatccagcttttcagcactagtcttttcttcaaccagctgattaccttcgatagtgtcgactgacttgtctgggtaggtaattgtagcttttccatcattagctacggtgacacccgttccttctgggaacttatccttattagcttcaacaatcttatcttcgatcgtcttcttttcatcagccgttaagctggttggattatcaaccttggtcttggctggaaccgttggatccagcttttcagcactagtcttttcttcaaccagctgattaccttcgatagtgtcgactgacttgtctgggtaggtaattgtagcttttccatcattagctacggtgacacccgttccttctgggaacttatccttattagcttcaacaatcttatcttcgatcgtcttcttttcatcagccgttaagctggttggattatcaaccttggtcttggctggaaccgttggatccagcttttcagcactagtcttttcttcaaccagctgattaccttcgatagtgtcaactgacttgtctgggtaggtaattgtagcttttccatcattagctacggtgacacccgttccttctgggaacttatccttattagcttcaacaatcttatcttcgatcgtcttcttttcatcagccgttaagctggttggattatcaaccttggtcttggctggaaccgttggatccagcttttcagcactagtcttttcttcaaccagctgattaccttcgatagtgtcgactgacttgtctgggtaggtaattgtagcttttccatcattagctacggtgacacccgttccttctgggaacttatccttattagcttcaacaatcttatcttcgatcgtcttcttttcatcagccgttaagctggttggattatcaaccttggtcttggctggaaccgttggatccagcttttcagcactagtcttttcttcaaccagctgattaccttcgatagtgtcaactgacttgtctgggtaggtaattgtagcttttccatcattagctacggtgacacccgttccttctgggaacttatccttattagcttcaacaatcttatcttcgatcgtcttcttttcatcagccgttaagctggttggattatcaaccttggtcttggctggaaccgttggatccagcttttcagcactagtcttttcttcaaccagctgattaccttcgatagtgtcgactgacttgtctgggtaggtaattgtagcttttccatcattagctacggtgacacccgttccttctgggaacttatccttattagcttcaacaatcttatcttcgatcgtcttcttttcatcagccgttaagctggttggattatcaaccttggtcttggctggaaccgttggatccagcttttcagcactagtcttttcttcaaccagctgattaccttcgatagtgtcgactgacttgtctgggtaggtaattgtagcttttccatcattagctacggtgacacccgttccttctgggaacttatccttattagcttcaacaatcttatcttcgatcgtcttcttttcatcagccgttaagctggttggattatcaaccttggtcttggctggaaccgttggatccagcttttcagcactagtcttttcttcaaccagctgattaccttcgatagtgtcgactgacttgtctgggtaggtaattgtagcttttccatcattagctacggtgacacccgttccttctgggaacttatccttattagcttcaacaatcttatcttcgatcgtcttcttttcatcagccgttaagctggttggattatcaaccttggtcttggctggaaccgttggatccagcttttcagcactagtcttttcttcaaccagctgattaccttcgatagtgtcgactgacttgtctgggtaggtaattgtagcttttccatcattagctacggtgacacccgttccttctgggaacttatccttattagcttcaacaatcttatcttcgatcgtcttcttttcatcagccgttaagctggttggattatcaaccttggtcttggctggaaccgttggatccagcttttcagcactagtcttttcttcaaccagctgattaccttcgatagtgtcgactgacttgtctgggtaggtaattgtagcttttccatcattagctacggtgacacccgttccttctgggaacttatccttattagcttcaacaatcttatcttcgatcgtcttcttttcatcagccgttaagctggttggattatcaaccttggtcttggctggaaccgttggatccagcttttcagcactagtcttttcttcaaccagctgattaccttcgatagtgtcaactgacttgtctgggtaggtaattgtagcttttccatcattagctacggtgacacccgttccttctgggaacttatccttattagcttcaacaatcttatcttcgatcgtcttcttttcatcagccgttaagctggttggattatcaaccttggtcttggctggaaccgttggatccagcttttcagcactagtcttttcttcaaccagctgattaccttcgatagtgtcgactgacttgtctgggtaggtaattgtagcttttccatcattagctacggtgacacccgttccttctgggaacttatccttattagcttcaacaatcttatcttcgatcgtcttcttttcatcagccgttaagctggttggattatcaaccttggtcttggctggaaccgttggatccagcttttcagcactagtcttttcttcaaccagctgattaccttcgatagtgtcaactgacttgtctgggtaggtaattgtagcttttccatcattagctacggtgacacccgttccttctgggaacttatccttattagcttcaacaatcttatcttcgatcgtcttcttttcatcagccgttaagctggttggattatcaaccttggtcttggctggaaccgttggatccagcttttcagcactagtcttttcttcaaccagctgattaccttcgatagtgtcgactgacttgtctgggtaggtaattgtagcttttccatcattagctacggtgacacccgttccttctgggaacttatccttattagcttcaacaatcttatcttcgatcgtcttcttttcatcagccgttaagctggttggattatcaaccttggtcttggctggaaccgttggatccagcttttcagcactagtcttttcttcaaccagctgattaccttcgatagtgtcgactgacttgtctgggtaggtaattgtagcttttccatcattagctacggtgacacccgttccttctgggaacttatccttattagcttcaacaatcttatcttcgatcgtcttcttttcatcagccgttaagctggttggattatcaaccttggtcttggctggaaccgttggatccagcttttcagcactagtcttttcttcaaccagctgattaccttcgatagtgtcaactgacttgtctgggtaggtaattgtagcttttccatcattagctacggtgacacccgttccttctgggaacttatccttattagcttcaacaatcttatcttcgatcgtcttcttttcatcagccgttaagctggttggattatcaaccttggtcttggctggaaccgttggatccagcttttcagcactagtcttttcttcaaccagctgattaccttcgatagtgtcgactgacttgtctgggtaggtaattgtagcttttccatcattagctacggtgacacccgttccttctgggaacttatccttattagcttcaacaatcttatcttcgatcgtcttcttttcatcagccgttaagctggttggattatcaaccttggtcttggctggaaccgttggatccagcttttcagcactagtcttttcttcaaccagctgattaccttcgatagtgtcgactgacttgtctgggtaggtaattgtagcttttccatcattagctacggtgacacccgttccttctgggaacttatccttattagcttcaacaatcttatcttcgatcgtcttcttttcatcagccgttaagctggttggattatcaaccttggtcttggctggaaccgttggatccagcttttcagcactagtcttttcttcaaccagctgattaccttcgatagtgtcgactgacttgtctgggtaggtaattgtagcttttccatcattagctacggtgacacccgttccttctgggaacttatccttattagcttcaacaatcttatcttcgatcgtcttcttttcatcagccgttaagctggttggattatcaaccttggtcttggctggaaccgttggatccagcttttcagcactagtcttttcttcaaccagctgattaccttcgatagtgtcgactgacttgtctgggtaggtaattgtagcttttccatcattagctacggtgacacccgttccttctgggaacttatccttattagcttcaacaatcttatcttcgatcgtcttcttttcatcagccgttaagctggttggattatcaaccttggtcttggctggaaccgttggatccagctctgctgaagtctttttgactacatacacatattcatcgtgatgatcaatagtatatgttccatttacagtatttgcttgattggtcgccaaattatagtccgttggtaaattgacatcataattataattttctcccaatttaccactaatcttatctgttgctacttcttccccatctcccggcacaaaaatagaatttttactcccagttacatcgatataatgaactctaacttcagacttatcttcactaccatcctttgcataatagtaaacaataccatcattagttgatgtaatctgatttatatatgtgtaccattttccatgcgaaataaacgacatgcgatcgttaacatttaacttgttccccaagtaacgtgtcgtattattaagcacttcaccatcataatacgcagtaactcgaaccaacccttgagcgtcaattactgtttgctttataactacatgtttatcaagtctaaaatcatacgattcacccactttatatggggagatatatcctgtggtctctggcgattttttcaatgtatatccatcaatagttggtgcctctccggtaattgtgtatttctgataagcaacaccttcaaaagattttggcactgcaatttcgtctcccgttgcttgatcaatataatgaatcgtagttgtcattttcgttggtattggagtcatcacaaagccatttcccattgaagctgggtctcccttaattccggtattgtgaccatatgcaaaaccaaccaccatgccatatatattatcgcctttttcgatcccatcaagatcaattgaagcactagtcccatcataattagtaaaaattggagtatgagtagttccactatactcaaccttctttgattcaccaggtgctaccactgcttcttgtatatttttacccaatccagtatgcaaaattgttacatataaactattatcattcaaattatttgagcgggccaacaaatagatagcatggtaatgttcattatagttagcaacaccggcaaagtagtatctcccgctctcatcgttggcagtgtggttttgtaagatttcctttattttttctgttgaagtgtcctgataccacttcaggttattgtatacccagttatccgtgggcttattaattatctccgttaacatgggctgggaatccagcttaatgtcttggtttgaaatcggtaagctagcagtacctgccaccttcattactggtcgtgcagccagtactttaaacttggcggctgtaaacttggcggttgtaaacttggcggttgtaaacttggcggttatcttttgtgtagttggtgttgttgcgtcgttagccggcgttacttcagtatcttttttgtcgacattggtagtattttgcgtagtatcttggccttgcggagtatcttggtgatttgttgcctcttcagtatcggttgtaggtacttgctgatttacattttggccatttgcttgtttatctgtactatctccactagtctgcggcgtagatgttgtaccttctgttgtaccttcagtaaccttgtccttattgcccccttgagtcgtggtacttcgtgttacatcatcactaggactagtaacagtatctgctaataccgcatggttgccatatagcataaaagttgtccccaacaatactgatgctactcctacagataacttccgtattccccaacgttgcttcctttcggcatgcttttgttggtagaattgatgattgtttttcgaaaccatatccgttcctcctaagctcataaaatatatatacttatcacactcttagtgtatcatatacttcgtataaatctatcaaaaaaacgattcctaaatttcaagaataagttagccactggactcaaataaataatactgatcaattgattattggtcgatggagctgtgatatctcttggtagaaggccttacgatagatatccattgacgaatgtccattaaacatagctcgtggatagtgattcatccaatcattagtcgctatgatctgagcactactatagttatttataacttcacctttggtaatctccttgcggagaaaccggttattgatctcattggatccgcgttcccaaggagaatatgggtcagtgtaaaaaacatggtcatgaactcgcgttaactcactaaattcagaaccattatcagaagtaattgttttaaaaatgcgatagtaagcattcttgccaagcttctgacgcaactcaacaaaaaaatgattcactgcatatgcagttttactggtaatttttctcgtaatattaacccgtgaaaaacgatcagtcattactagaacaacgctatccttgccatctttatgaccttgaatagtgtctagttcccaatgaccaatttcggaccgttggtccgcaacctgtggacgttgagcaatgttaggtcctaagcactttttggcttgtgaatgagattgatggtgtttacgtttagttttctcaaaaaggtccaagttagacgtacggaatacaccatcattaatccactgatacaaagtcacaacagacttagggatcagtgaatcatcactcatcaaatcacgtgccttataaatagccgcttgaggagagtaacgatgctcatcaaattcaccaagcattaattggtcggccaattgtaaaaaacgctttgagcggtaatataaacgaggacgaccggaccgttggtggcatttaagataaatattctgaccagcttcataactgtagatgtgataagggtaatcgtaagtcttaccattgaatttttgacgacgaatttggcgaactgtaccacgtttaagctcattattaatggtttggtggttcactcctaattgacgaccgattgcgcgattggaaagtccttgcgactttaaagtcgcaatcatcactctctcttctttagtaaggtgtgcatatttgcgataagtggccaaaaggttagtgagcatggtatcatttaagtgcgtcatttgacggacatcctttcatatagttttgattcacttaatatgatacctgatgtcacgccgaatggcgtttttgcatttaccaccaattaggtggctaacttcattctataatccaccgttttaatatctttttgaaagcgtcttccaatcgctaaccaactaatagttaattttcttaagtcagtagggaaaatgggcccaccatgcggcccgaagccacaaaaaaagccccccgccagcagcaatcaggccgcaagcggggggcttttcggtgggggccgaggcctcaaccaatcccttataagttgctaaaatcagttttatctaaatctgtatccgggttaacttttggccaactgtcaaagtgccgcaaccaccatttgtaattatcgtcggcgacttggtagaacaagcccgtggacgagatccggtacttggtaaagccgttgccgacttgatccatcgtgccaatgattggcaccccatagaagtactggtggtccatgtcaataatcgtggtaaagtgcccactcttggcctctttgtcggtaaagaagccttcaaagtacttaatcccttccatcaggactaagcgtgattccatatcggccaagtactccggcgttaaatgttgcgaaattaccggtggattcccggacggataagtgttttcgttgtaccccgccgtcatggtatgcggcgccaacaacacggcaatcgatcccaagtgggagtaaccggcaaattgcggcatcagcccagcttggtattccgctaacgcatgcacggccaacattgccttgcgcttatcattgaggggcgctaattccaaggggtgttcaccgatggcaaagcgcatcaagttgacggtctttaacatccgctgactgtaagcatccgccaaattgaggagcggctttaacgcggccacatcggcatccgttggcaccgtccgaatcgccttggtgacatccccattgatcgcatcctggccaccacggccggcttccagttccacttgcaattgtccctttaagcggtccaccgtggccaccagctgatcataagcaggggtccccacttgcaagtaatctccaaccgttcggtattgcagatattccggatccagcggggccccttcataaacgctcccttggtatggcaaggtcgcattgactaattcggcccgttccacaactttcttcagtgtggtcgtgagtttgtagtgttcgtcagcatattggacataggtactggttcccggcacctgctcggccattagttgctccaaagcttcttgccgccgcacattattgtccgcgatcaatttatccgcggccgcttgggcggcttccgcactggtcaagacctcctgtaatgtggccgcttgactttcatactgataggcctggtcgggatcggccagcatcgcttgcgcgcccttgatgaagtcattgacccggttgatttcattgtataaggtcaaccgcgtcgcaactaagttttgcaaggcgatcacggcggcttccaaatcgcgccgcccctgcatttgttgggccgaactttggatatataaatccatccatcgtttcagtgacgcctgattatcctgaatcccttgcgtggtataagtctttagatttggtaagacattgatcccgtatgcttgcaagatgccttctgcggcctggcggtattcaggactgacatactgcaaggccgtttgatagtaggcgaccgtagctttaaattcattgatcgcatccactttggcctgctcggcgggactcaaaatcgcgccgtctaatttggcctgggtggcctcaacttgcgccacggcggcatccagcatcgcctgcgtcaccgctggcgtggtcatcagtttttgtaaggccgccacggcttcgtcatacggggcttgagccgtcgtcgtggcattgtgataccgcggatcttgttcccgttggtcataccgcttcagcaaaaccgtcgccacgttaaagtccgtagcctgaccatccaacgcagcttgagccgcatcgatttgcgcgatggcggcctgcatttgctccgccgtaacttgcggatcgtattgcaactggctcgcggctgctaaagcggtccggtaagctaattgcttggcagcatccgcattgtaatacgcggccgttgtcatcacgctttgacccgttaacaaccgccgttgtaacggttggagatcaattttcggttgagggcgaggggttggtttcacctcgtcgatcgactggggttgctcgtcgctggccccagaaccagacgttgggttgtcaccactcgtggctggtgtgtctgtcccagacgttggcgttttgctggctgtgctactgtccgacgtggctggtgcttccccacctggcgttgcactggtcgttggattgtcaccgctcgtggccggcgtgtccgtcccggacgttggcgtttcacccgctgtgccactatccgacgtggctggtgtgtctgtcccagacgttggcgttttgctggctgtactactgtccgacgtggctggtgcttccccacctggcgttgcactggtcgttggattgttaccgctcgtggccggcgtgtccgtcccggacgttggcgtttcacccgctgtgccactatccgacgtggctggtgcttccccacctggcgtcgcgctggtcgttggattgtcaccgctcgtggccggcgtgtccgtcccggagcttggcgtttcgcccgctgaggcactagctgacgtggctggtgcttccccacctggcgttgcactggtcgttgggttgtcaccactcgtggccggcgtttctgtcccggacgttggtgtttcacccactgaaccactatccgacgtggctggtacttccccgcctggcgttgcactggtcattggattgtcgccgctcgtggccggtgtgtccgtcccggacgttggcgtttcgctcgctgaagtactgccggacgttgccggtgcttccccacctggcgttacactggtcgttgggttgtcgccgctcgtggccggcgtgtccgtcccagagcttggcgcttcacccgctgaaccactgtccgacgtggctggtgcttccccacctggcgttgcactggtcgttgggttatcaccactcgtggctggtgtgtctgtcccagacgttggcgttttgctggctgtgctactgtccgacgtggctggtgcttccccacctggcgttgcactggtcgttggattgtcaccgctcgtggccggcgtgtccgtcccggacgttggcgtttcacccgctgtgccactatccgacgtggctggtgcttccccacctggcgttgcactggtcgttgggttgtcaccactcgtggccggcgtttctgtcccggacgttggtgtttcacccactgaaccactatccgacgttgctggtacttccccgcctggcgttgcactggtcgttggattgtcgccgctcgtggccggtgtgtccgtcccggatgttggtgtttcacccgctgaggcactgctggacgtcgccggtgtttccccgcctggcgtcgcgctggtcgttgggtgctcgccgctcgttaccggcgtgtccgtcccggacgttggcgtttcacccgctgaaccactgtccgacgtggctggtgcttccccacctggcgttgcactggtcgttgggttatcaccactcgtggctggtgtgtctgtcccagacgttggcgttttgctggctgtgctactgtccgacgtggctggtgcttccccacctggcgttgcactggtcgttggattgtcaccgctcgtggccggcgtttctgtcccggacgttggtgtttcacccactgaaccactatccgacgttgctggtacttccccgcctggcattgcactggtcgttggattgtcgtcgctcgtggccggtgtgtccgtcccggacgttggtgtttcacccgctacgccactgtccgacgttgctggtgcttccccgcctagtgttgcactggtcgttggattgtcgccgctcgtggccggtgtgtccgtctcggatgttggcgtttcgctggctgtgctactgtccgacgttgccggtgcttccccgcctggcgttgcacttgacgttgggttgtcgccgctcgttaccggtgtgtccgtcccggatgttggcgtttcgctcgctgagccactagctgacgttgcgggtacttccccacctggcgtcacactgaccgttggcttgtcacccttcgtggttggctgactcccttgatcaagcggggtggccgccattcccaggccaccaaaagtcccgatcggctcactgctccggcctgaactgacttgcggccacaggatcgcattggtcgttccgattggggtccgccagacttgcggtggcaagtttcgatcaatcagtttccgaccatccggcgtagtcatcgtcacgtggttgccgcgaatctttacgaccgttcccaccgggatgtggtactgatctccttcgtgcaaaccattccactccatcaaagtatggtaatcaatccccaaaacttgcgccaaggcccacaaagtgtcacccgcccggaaagtataggtttgatccgttggcgcaatgcggggcgcaatctccgccggcgtcgtcgctcgccacggtaacaagctcgccgcatcaatcgtggttaggcctaagcctaaggtaaacgcggttaagtcaatcgcaatccaatggtttcctttcttaactaacttgacccggtacaaccggtcagcaatcatttgatatttatgttccatttttctcccccttattttaaggataatttaaccaatggccactctgcttcaagttaattctaacttaatttcttgcttttttcacttattacgcgaaaaaagaggctgatcagcgatcaagcccctttcctcattggctaaattattcttttcgtttccgcttgctcaggcccaacaaccctagaacgccgagcaacgtcaagcccagcacacttgtttcagacgtttggttccccgtctgtggcagttcttgccttgccgttggggttccttggcccgaaggggtcgacgttgattgactcggtgccgttggttgagcaggctgcgatggtcctaccggttggactggttgaactgacggcgtaatctcaccaccgttggtcgtcttcaagtagtagaagatgacctcggtcaagcgaccatcggcccctttgatttcccgacgttcaaattggtgaccagtaatcactttgtggtattcatcaaaattcgtggccccgttcccctcaacgatgatcgaatccgcaattgaatgcccattttcatcataaatgttaaaaatataaatttatccccataatttgctattaaacccatttaccaatagctagataaataaatcatctttgttataacttatttcctgatcgagtaactaacttttcgctcttaatctttccaaagcttattcaaaaacccatcaaaaaaaaacgccaaacccccttgaatgggtttggcgttttagtcaactaaatttcgtttagccttcatcttttggcgtttgccgcttcttcttccgacccagcaatccggccaacagcaagcccaaaccacccagcagcccaccttggttggtagtggctccagtttggggcagcttgcccttgctcttgtcacgctgcgcggcggcttggtccgttgccgtttgatcccgcaagctgactggagcgctttgcccatgcttagttgccgacgtggacgatgtgagcgacgtggacgtgaagtcaatttcttcagaagcgtaatcatgcagtcccttcaatgagtcactttgtgaagtggacatgctcatcgattagatgcccgattgggaatcaaccttctgactttcgctggccgaaagactgtccgaagctaacgaagcacttgtcgaagctgacgttgaggcactcgtcgaagcactcgtggatgcgcttgttgacgcactcgtcgaagctgacgtcgaggcactcgttgacgcactagtagatgcactcgtcgaagcactcgttgacgcactcgtcgaagcgctggttgaggctgacgtcgatgcgctcgttgacgcactcgttgatgcactcgtcgaagcactagtagatgcgctagtcgaagcactcgtcgaggcactcgtggatgcgcttgttgacgcactcgtcgaagctgacgtcgaggcactcgttgacatgctttgactttgtaccgtgctcaatgacgcactttcactttgtgctgcacttaacgattcacttgtactaatagattccgactcttgccttttgcttgtactagtagattccgatttcttcagggaatgactagtgctagcactctccagttgacttggaatcgtcgaatcaatcgtcttattgtccttatttaaattataaacttcctgtcctactaactcaccttgtaaattcttccacccatcttggtaggagttagcaatcgcatagaccccgagaaagatcctttattagcccctgccgctaatttggcctgatcagcattactatgtttcgtcgtaaaagtaatcgtgtaagaagcgttttgtcccccggtcgtattcccccacgattggagatacatagccgtcccaatcgtactcttatcaaaggaagtcgtaaatggcgcggttccatttactaaatcaaatgatggcggattccctccaacatttgcgttatccatttcgttactataagcaaaagcatcaccatttttatcgcttccccggcccgaaaagaccgagttatcaaagtcgctacttgacatatgccaaatatcggcataccgcccgaagtgatagtacagattcgtggtgttaccgattaccccgtttgttggattaacgtccctgggcttaaatgagatgtctgattttggattgacgttccctgagtcgggatcatccgctgaatcccgcaccttcacaccgcccccggtcccttccagttggtaggtcgttcccgggatcatgctggtgtggatattcacatcaccaatgatttggtagtccttggttaggtaaaagcccatttgaccttgttgtagtgggtatttagaagccgctccccagcccttgtaccagaccccctggccgggataaaaggtaatcttccattttgtatacccgtcccccaagtcgcttttttcgactttaatattttccggtgcattatatagttgtttatcattgtcattaccaatagaattattacgcgcggtataggcatttaagttcgtccacagtcgatccgaccctacgatccacttataattaccgttccacaaagccgctgtatcaccagttgctgtattatcatctggcgttaaaaagttgtcactccctgtggctgaattagcatcaaaaagggccatttgagtggccaattgttcaggcgtgatcccagcatcgatcaccgtcatcaacgattgcaattcacttaaaccgtagctggcatcactttcagtgacttgattcttggccaagacggcttggtattgggcaatcgccgcttggtaggcttgctgatagacactggccgcgttcttgtaactgtccgtggccataaaggtgttggcttgggccaccagttgctttaattggtcgacctgcgatgtggtcgtcgtcgccgtggttgccatcaggctatcggtgctcatcgtctgactggtcgtactcgtggtcgtttggctgttggtactcgtcgtgctggccgattccttggccgaagtcgaattgctggttaaggacgcactggtactcgtggcggacgtcgacgtgctagtttcactagtggatagtgagcccgaagtactggtcacttgattgttggcggaagtcaaactaactcgatcagtattcgctaaggcactggccgcggcattattcgtggccgtcgtttggacccccgtggtcgtggccgccaacgctccggttgaagcaaccgtgccgccccccaatcattgccccggcggctaagacccctttcagcaaggtcgccgactttgaatccaagttcgcttctgattcatccaattgcaccttgtgtggtgccgaatgcgttgcgatctttagtaaacccacccgggttaacaaacattgcacccattgcttccctgacttgtacaattttacccgagtagtccgggagctttcggtgatcgtttccttttttgtccgtttcaagatcccacgtcctttcatttctttatgtacgcttctagtcagttgccttgcgctcaatatttatcaattgattaacccgtcctgcgacgctcgtcccaatttcaaacattcttgtcagagatattccacgattacgtttagttaataatttcagcgctttctttactcgttgttgcgactgtttagctggacgggcgtaggccccattgtggtctacacccaacgaaaagccaagaaacttcaaccgtagagggctaccgactttggttttatctgggttcactttaactttcaagcgcttttctagaaactgggtaatgcttcgcattactcgttctccggctcgttgacttttaacatagatattacaatcatccgcatagcgcacaaagtgatgaccacgtctagtcaactctttgtccaactcatttagatagatgttcgccagtagtggtgacaatggccctccttgtggggttcctttttcactcttagcgaaaagcccatggtctaagactccgctagttagaaacttacgaatgagtcttagtgtccatgggtcatcaatatattgttggagatacttaatcattaagtcatgattaacgttatcaaaataggcttttaggtctaagtcgacaactcttcgatagccttgattataaagatctactacttttgcaatagcgtcatgggccccacggtggggacggaagccaaaactattatcagagaaaacacgctcaaagataggcgtaagaatttgggctacaacttgttgaaccattcggtccaccacagttggtattccaagtcttcttactccaccattaggcttcggaatttctacccgtttgactggtgctggtttatacttgccctcacgcaaactagcgatcagttccatcttattttctctgagatatggcagaaggtcattgactgtcatatcgtcaatgcctgctgctcctttatttctcttaactcgcaaataagcctgattaaggttattgcgatccaagactaagtcttggatagtgacactcatacctttaccttcaccataaccggtactacgcgcccttgtgtactttcggttttccaaacctatcctcgacaagcggtcagcttgttgttctgttttctgcgatcgtcgcacctgattacacctccgatataagttacaagttattgtcgttcagtccttaatctgattactcaaactactatgacctcggctgactcctgacttactcaacgctacaccactgtaccgcttgcttctgtggaaatttatcttattcctcttgtcggaagcttgtaagtcaggcctccccgggtaagaatattagctttcgtaccatgtcatcgttagctttactgagaccaacttcgagtagtattggacttcaacttgtctagcagccttatccagttaatttcagccttatagctacttcttgttcatcgatgcagtactttgccttagacttccttcagattccacctcacggtggacacccttgtcctcagctcatggttccgactactacggcccatagcggactttcaccacctagctaatacccatgccgggcgcactacaaaaaaagcacccagctttcacactgggtgctttcgtcatatggcaaacattttggcaaacaaacatgttatttttaatgagttggtcaagttttagcactgccaaaatgccgatatatcgcgcttccaactctaagttacattacaattctattcgtattcgatcgtcgaaggtggcttactcgtaacatcataaagaatgcggttaacgtggtcgacttcatttacgattcggactgagatcttttgaagaatatcccatggaatcttagcgaaatcggctgtcatcccatcaattgaggtaacggcccggatagcaactgcatagtcatatgtccggccatcgcccatgacaccaactgaacgaatacctggtaagacagtaaagtattgccaaatttcttcatcaagacctgcttttttgatttcttcacgaaggattgcatcactttcacgaacaatttcaagcttttcaggagtaatttcaccaataacacgaattccaagacctggacctgggaatggttgacgccataccaattcatgtggaattccaagtttttcaccgagttcacgggtttcatccttaaagagcttgcgtaatggttcaattaacttgaaaccgagcttctttggcaaaccaccaacattatggtgagacttaattgtctgggcggtgtctgttccagattcaattacgtccgtataaagcgtaccttgagctaagaaatcagcatctttaatcttcttggcctcttcgttaaagacttcgataaattccttaccgataatcttccgcttttgttctggatcggtaataccttcaagcttacctaagaagcgatctgctgcgtcaaccttaataatgttaacaccaaggtcgcgactcaacgcatccatcacttggtcagcttcgttcttccgtaacaatccgtggtcaacaaagatacaagtaagttgatcgccaattgccttatgaatcaaaacggcggtaacactggaatcgaccccaccagaaagacctaagataaccctcttatcaccgacttctttgcggatttcatcaatctgcatgtcgatgaagtcatccatcgtccagtttgctttagcgccacaaacatcaaaagcaaagcggcgtaaaatgtctaatccgtattcggaattacgaacttcagtgtggaattgaacaccatagaatttacggtcattatcagcaatcgatgcgattggacagttcttactagtagcagtaacttcaaatccagctggggcttgagttactaaatcaccatgactcatccatacatattgcttctttggcaaacctttgaataatacagcctcgtcatcaagtacttcaatatctgctcgtccatattcggagttatcagctttttcaacctttccgccaaggtcgtatgacattaattgcattccataacaaatacctagaatcgggataccaagcttaaagatttctggatcgaccttgaatgcgtttggatcataaacactattagggccaccagagaagatgatccctttaggattaatctctttgatctcgtctgcggttaacttgtgagaaagcagttcggaataaataccgaaatcacgaagccgacgagtaatcaattgattgtattggctaccaaaatccaagacaatgatcttatcaaacgcatctaaattgatgtttgccacaatgacacttcctttgttcaaatttttattcttaaaggctagtttacaggctgaacatggcatggtcaatgattatttaatattccataacaaaaagacgggagctaaattttctcacgcctttttcgttagatggaattttattgaggatatttaattagtgttctaaatcaatatttaatagacgtaattcttcatcaactgcttgtgcctcaagtgttttagtatctttatcagtttttatcatttcgacagcctcctcatctcatttaatctgtatccttcttaagtggtctgtgagtaattgtcaataaaaatgagtcataaatatcacgtgcaaccgtttcgaacattgatacattaggattaaaaagatttattttttacttttactagatgttttaactagattttctaatgcagaatttgtaatccattccaaattcggttgatttgaatgcgctttctgcatttgataaaatttagttagttattttttacttgaggtgcaatatgtttattcggacaaaatatcttaaccaactaataaacagcatgaaccagtcaacaattaaggttcttgttggcgttcggcggtgtggtaaaacgactattcttgaccagtttcgggcaactctccggcgtcaagaaatttcctcaagtcaaattcaagtgatcaactttgaatatctcctagaaaatgaattatgcaatccagaatatctcttacaatttattcttgatcgacttagtaaacaccagatgaattatatcttccttgatgaagtcgaagtggttccccagtttgcccgcgttgtaaatgccctaaattcactctctaatactgatatctatattacaagttccaacaaaaccattttggagaaagaaaatcttcaacaaatgatttcttatactatcatccccgttttcccttgcagcttccgtgaatacataaaaaggaaccaacaagaagctgattcccaatcgttatatcaatatttaaatgagggcgggttcccctatactcacgaaatccacggtccaatcaacctccgcaattacgtgaatgggatcatcaacacaattattattaccgatttcacccagcaggcgaccctttgcaatccaggcctgactaagcaacttgcccatcacttagctcatcatgctggaaccacacaaaatatctcccaaattgtcgatagtcttaaacgtcaccacatcactacttccaataagacggtcgatttttatttacagttcttacagaggtcctttatcttttacccatgcaaagaatatgatttttcccgtcgccacgtcaaaagtaccaatattcgttattatccggtagatcctagtattcggcaagctctcacactgaaaaagaatgtcctttctcaacgaatccttgaaaatattgtctttattgacttattgagccaaggctatcaagtatatagcggccgcatcaaagataatgagattacctttgtcgcaattaaaaatgatatctttacctgtatccaaatcgcttattcgcttgctgatgatggtgcctatcgccgggcgatcagcggattacggcaactttcctcaaaatataaaaagcttttaattacagtaaaaccagcgctcaattacgctggtttagatcctgatattgaaattattgacttgtatagttggctaaccaattaacctcgtcgcagataaagcttatccacgacatgtcccgttgtcttatgtaaaattacgtcagcacgacttttggttggaaggataaactctcgtaaattaggaaggtcgacgcgttgccaaacatcctttgccattttaaatgcttcctgacggtcacccttcgaataaggatagtaatagtttgatgggtcagtaaaggctgtctctagcaacatcccaaaccgttgaagataccaatgttcaatcaggtccggatctgcgtcaacatacaatgaccagtcaaagtaatcactgacatatagttgctggttacttggcaattgcaacgtgttaatcccttctacaatcaatatgtctgggcgatcaattaccaagggcttatccagctgaacatcataaacttgatgggagtatgtaggcgccttgacaactggttcccctgccttaacatcattaagaaactggaggagcctttccatgtcatatgattcgggaaagcctttccgatccatgatcccccgccgttttaattctgcattaggatataagaacccatccgttgtcattaattctacccgcttatcaggcagcatcttatttagtaagatactaatcaaccgagcgatggtgctcttcccaactgcaaccgaacctgcaataccaataatatatggaatgcgcatcgtggaacgctgtaaaaagtttgccttttgcatctgccattccaaaaagttctggtagcgcagttgaattaattttattagcggcaaatatacatcttgcacatcctcaattgaaattcgatcattcaacgatttaatttcatccaagttcccctgggttaaccgtactgaatcagttgggaaaaagccgtgccatgtttgccgatcaaattgttcgtagttcatccattcatccattatgcaaaatcctttatttcacccgtcaatgaaaacggttactcaagtttaatagtaacatattataaacataattaaagctcaatctagcttgtgaacacctaaacattttaccagataattagcgcagcgcaactgtttgaaataaaaatggagactagtactattactggcctccattttcatttgattatggtttagggaagtttaatttcggataattctttaactctggtgcatcggttgtgtaatcatcgaaagtactctggttattattttccgactttaaacttgtcttctgtttcttttgctgcttctgtaaattcttcaagctcttcttaaggttataagtatattgttttttatcaactttcttaaatcctggaagtttgtagaaccgaagcaagtcaccattcacgactttatctgataatccaagatcagttgtaacgtatttttgaatcttaccaatttctttacgttgcgctgcggtttggtgagtaatctgcttaccattcttagtgtaatagtagtcaccattatacttagtgtattttggcgttacccaatcaccatttctaaacggtacaatttgcttattttctggtgagagcaagtcttggccgaattgaatataattcttagagctaattcctaacaaatcctcaagagtaggtaaaacatcaatttcaccaccatacgtatggttaatgccaccttttaggccaggcatattaatcataaatggtactttttggaacattgctagatcataattagttactttcttcttacctaagatttgcgcaatggctggttggtggttattagagattccatagtggtcaccataaagaactaacacactgttttgccgtaaccccgtcttatcaaggtaatcaagaaattcgccaagtgattcatctaagtatcgtgcagtttgaatataagggtcgaccgtgtcatcaccagtcttccacgcttcgatatccttattctttttatcaagaatatatggatagtggttagtaactgtgatgatctttgcatagaatggttgtggaagctgctcgatatagtgggctgattctttcatgaagatcttatccttcattccatatccagcatcataatccttggtctttgggtaatactccttactaaagaagtattggtaaccaaaagacttataagcattatcacggttccagaaactaggaacatccccgtggaatgaggccgtcgtataacctagtttttgatgaagaagcgctggcgcagattggaaggtattagtcgtcccatcagtaaccattgctgatccttctggaagaccaaatagcgagttttcgagcattgtttctgcatccgccgtctttccttgaccaacttggtggaagaaattatcaaacgccaaagtatcattagcatggtacaacttattcaggttcggcattacttcttgaccatcttctttatagtcgatcatgaattgctggagactttcaaggtgaatgataaaaatattctttcctttagccttaccgtaatattcaacgtttggcgtagcataattactatggatgaaatgcaaaaccggctttaattcgtcacgattagcacgcgcttttactacactgttattagtcgtcttaaccccatcataaactgtatatgcttcgagtcctagatacttaacaatataattattatcaaatgttcgcgtaagtagttgtgaacgatcactttccgccattcctaagttaactccaaatagaacaaagccaagggcagtaatcgtcatcgcatatctaaccttaaagcgtcgcatatcaacacggacaaagtggaaaaataagatgagtgctaaaattacaacatccaggtaaaccaaaaagtcttcgggacgtaatatccccattaaacttttaccaagattatttgaagccgctccagatccctttattacgttaaaggtaatgaaatctgaaaattctcgatagtacaaaatatttgcaaaaagccatgtcgacaatgccgcattaattatcaacatcatccaataggacaagcgtccacggaaatataatgcaattcccaaaaatacaagggcacttggaatcgtattaaatgctaaaaggaattgttgcatgcttccttttacacctaaattaaattcattttgataagcccaatagctctttaaacaaaataaaagtacaacaagcagaaaaaaaccgagcttggtattcaagacacggcggagcttctgcaacgctgttttcatagtcgttcctccataaaaaaatatcattattaacaataatacactaactagctaaccgcaaccgtacaattttatttttccaaaaagttaaaaattctgtcacttttctgtcgtagttaaccttttgaaaatagatcttaaatgttatgattgagtgtcgttaattaacagaagggactgagcaccatttcaaagaaaaaagcgaatttaatgttattactggttgctattctatggggaagcagctatgtatttgccaaactaacgattcaagcagggatgcattctggagttatcaatgcttgccggggaacaatgtgtgtaattgccggttatcttatcttccataaacagatcaacaaaatgacttggctggatttcaaactaggagtccttatgggaacaattaatttcctgggttattttttgcagactgatgctctccgttatactactccggctaaaaatgccttcttgacaaccttatatgttgcaattgctcccttgatcttgtggttgttttggcatgagcgtccacaacggaagacatattttgcggtcgccctcgctattatcggaatggctgtcatcactaatgttgctaatactggccttcaattaaattttggggactttctaactgttgtttctgctattttttgggccttacaattaatcttctttggaaagtacgcaccgaaagtttctagtccctgggtggtaatcttcatgattggcctatgtcaaggcacgttcggttggattacgactggattatttgaacgtactaaccttacacaaattcattgggttcaagccctgattcccctggctattttagcgatcgtcgtaaccttcttagcgcaaggaatgcaaattacagctcagcaatatactgatgctacatctgctggattattattgatgttagaatcattttttgccagcaccatgtcagttatcatgggctatgatccccttacaccacaactaattttgggtggtttaatcttacttttagccaatgcaattatgcaagttaatctccaagatgtgccatttttaagaaaacagaattaaaaataacgaggatgaaaagttttttcatcctcgttatttttatttgcttactttcttatcttccttggcaaccgctgcttgagctagcaagttgacatagttaaatggtcggtcaaagtttggctggaacattgtatcatacattccaagaaactcaattgtattttggttctgaatgcataacgaaatcagacttaaagtttctgaaatatcgtgtttactcatcatctgtgctcccaagattcgttgggtatccttatcccaaaccaatgacatcaggaccggcgtggtagttggtataaagtgcaatattactcttgccatttatttatcaacattaactttttcatattcatctgtcggcacttgggtcagcaaactagttgtcctgccaattgatactaagcttaactcatgcattgctcgagaacaaattgtatatagcaattgtcgctcatcgttaccatggtattgctgatcattcgcattccagacaataaccgcatcaaattccaacccttttgctagatatgccggcacaacaattggcccctttactaaccgttgattctctgtccgaataacggtggtcttgatattattggcatttaacttttgatacaactcttcactgtctttgagatctttaccaataattgcgacggcatcatggtcattctgatacttattaagaatattaataactgccgctaccccttcttgttcatccttagtttgataaacttgtggcttattaccttcacgttcaaaggcttcaattgcttcaccgtcaattaaaatatgcttagtaaagtcggtaatttgtttcgtggaacggtaagacttagttaattggacaaccttcgtcttttctggatcaaacatcgtccctaactgctttaatagtgaccgactattctcatgagtgaaaatcgcctggttaaggtctcctaacaatgtgaatttagcacggggaaaacgatatttaaggtaagctaactggtaagcatcataatcttgaacttcatcaacaaaaacgtaacgaatatcacgttgaccacgctttccagtaatcaaatcatacaggtacaggtaaatggtaattccgtttgcactgatatttcccttctttagctcttcttttatcccatcaacataacctttccattgctctgcagaaataccgtattcagcaatattaacaagttttggagttacccggagaaagtgtaaaaattgtccattgatgttaagccactgattatgatcgatggctttttttattggcataaatgcccgcataacgatttgacgcgcaaggaacttgtattctttatcttcatcctcaaattcacgtggctggttattaaataggttgtcgatttcttctttactcaagctttgaatttcatcctctacccatttgttgcgcatttcagatccaacacggtgattaaggtatttaataagagcttctttcgttccatccaacctatttcccaggttatagttattgttaaatgagtagtaaatctccttaatcttctctttgctcaaaaagactttaccattaaacataaggttgcggaaacgcatattagcatgaccaagatggttagcataacgctctgttgctttgaaatattgtaagctagttaatagttgttgtgcattcttagccgtttcatcttggtgactttcaaaccgttgttctaagttttgaacatgaagctttggtacccgacgattagcaaactggaagtaagtcatctggaccatattatgctcacccaattccggtaaaacttgatcaatgtagtcattaaataattggttaggtgaaaaaagaacaacttgtgaagaggtcaaattcccccggtaacggtaaagaagccaggcaacccgttggagaactgcagctgtctttcccgagccagcagccccctgaacaaacaacaattcatttttagtgtcacgaataatttcattttgtttccgttgaatcgtcgttacaatgctcttcatcttggtacttgaatggttaccaagagcatcaagaagcatctggtcgcctacttgttcgtcggtatcaaagatggttacaatcacgccatctttaatttggaattggcgcttaagagtaagatcaacctcttgttcacctaccggagtctggtacttaactttcccgagctttccttcatagtaaacagacgaaatcggtgctcgccagtcataaacaagaaagtgatctggcttatcggtaaaggatgcaagcccgatatataccttttcggattcattggcacctttttcacgaaaatcaatgcgagcaaagtaaggtttcttttcaagtcgctgtaaagttgctagccggtctgcagcgtgttgccagctattttgacgttcatctagcatctgctgttgagcacgaaaagacatggccgtatccatcatgcctgaataagtagtggtatttaagtggatatcatcaatttgcttattgatgcccttaatatcatgttgagccgttttaatctttttttctgctttttgttcggcctgttttactttatcaatcacattatcaaggtacttttgttctagttctttttcagttttcgtagacattacatactccctacctttcatcttcaggtcgacttacttaataatttatcttaaaatcatccaattattatatcattttcgccaattagtctgttaactttccgccttctattttttcaattattaaatgtcgtttaattttaatcctaagatcatcaaaataactaataataacgctacaatatattgaagccatgatccaggaggaggaaaacaacaatgagccatattttttatcttctaactcatattgcggaaataattattcccatgtttgagtggatgggcgcttggagctatgttctcctttttatcctaatttttatggaaactggattagtgattttcccatggtttcctggtgaatcactcgtctttttaacttgttctttcattgcttttaacccgatcttaaaaatggaaatcgtcatccccgtcttcttttttgcggcgctaattggtgacacagttaattattatattggtcattccctttctcattggcaatggctcaaaaaaagaatggccggtccccgttttgagaaagcacaagaatttttagcccgtcatgggatcaaagctgtagcattagggcgatttgtaccgctcattcgtacctttgtccccttaattgctggaacaatgcagtttccgttccatcgtttcacagttggcaatattatcggcgttactttatgggtagcgattggtgctggatgtggatattactttggaacaattccgtttgttcgtcagcacttctcacttatcatcttagcatttgttgtgtgttcactgttaggagttggcttgttagcacttatcaaagcgattcgtcaacgaattattaagcgaaaccgaatgctataattgctttttcttcagcgaaatcatgttaaaatgtaataagtatttttatttcgcttaaaggagtgctgtaactatgacaatcaacgtttattttgtacgccacggacaaacctatcttaatctctacaatcggatgcaaggttgggctgatggtccgctaacgccaaagggtgaagaagacgctaaacgagtaggacgggcgcttgctcctattcaatttgattatgtattttgcagcgacctcgcacgaacagtttcaactacccgtttcttgcttgctgaacatcctggtaataatccaacgccaattccagagccagcgtttcgggaagaattctttggctactttgaaggagaagatggccaacattttgctgactttcttggcggcccagatggttatcatagctttgcagaaatggttgccggttggggtccagacaaattaaaagataagattgcagccgcggataattatggtactgctgaagaccatgttactttctggaagcgggtagataaaggttttgaccgtttacgagcattgccagacggatcagaagtactagtagtttcacacggagccactattcgttcaatcgtccaacgctattctgacgcttacgatccaggcgattcaccacgtaacggaagcatcactaagctaactttagataagaataatactactgttgatttttataacaaacttgaattaccagaataatatccataaagggggaacactattcttcaatggagactaacatacaaactgcagaaccagtaattatcactggcttaaataccggtcaagaagactttgactactcaatggtcgaactggctgaactagcacaagcaaatcacatggaagttatcgatcggattgatcaagtcatcgatcgtcctaatcctgctacctactttggaaaaggcaaagtcgaagaaattcgtgacgtggctgatgctaatcacgttcctactattattactaatgatgaattatcaccaagccaattacgtaatcttgaagaaggaaccggatgtcgtattctagaccgaaccgctcttattttagagattttcgcaacccgtgcgcaatctagagaagccaaactccaagtacagatcgctaaactgcaataccgtttaccacgattgcaaactagtgcaagtgagcggttagaccagcaaaccggtggaggaagcggctttactaaccggggtgccggagaaaccaaacttgaaatggatcggcgaactatccaacatcaaatttcccaccttcgtcaagaactggctgctattgctaaatctgaacaaaccaagcgaaaacaacgagtaaagagtgcaattcccacagctgctcttgtcggctataccaatgctggtaaatccacgattatgaatggcctcgtaagaaaatatggagctgctgaagaaaaaactgtttttgaaaagaatatgttatttgccacccttgatacaagtgtccggcaactaacacttccagatcaaaaacgcttcttactcagtgacacggtcggttttgtcagcaagttgcctactcaccttgttgaatcatttaaatcaacacttgcagaagccgctaatgctgacttactaatccaagttattgattattctgatccacattacaaggaaatgatggaaacaactaacgagactttaaaacagattggaattaatgatattccaatgatcaatgtgtttaataaagcagataaaactgaaatagaatttcctatcctcgaaggtgacgatcaagttgtaatttcagctaaacaagatgcttcattagatcttctcgttgacgttattaagaagcatctctttaaagactatgttactaccacgcttttaattccatttactgatgggcacgtcgtttcttacctcaatgaacacactaatattttagatactacttatgaaagtgatgggacattattaacggtagaaatgtcagttcaagattatcaacggtttggaaagtatgaaaagaactaacataaaaagcagcgatcaatttttggccgctgctttttatgttagtctatctctctgcttttactccgaaaatcaaggagacaatcattactaagattactgctccaataatagatggaataattgccattcctgctacttgtggtccccatgcacctaacactgcttcaccgattgacgagccaaccagtccagctacgatattactgataactcccatcgatccaccgcgacgggttaatgcaccagcagcaagaccgatcaatccaccaacaattaaaacccaaatccaatgcataattatccctcctttttatcttccaatgtctctttaagatcagttgccttatccttagcttttcctttagctttctgcaactttccctcagtttcgcgggtcttgtagttggttattttaccttcaacctcttttaatttacccactactttatctttaattccatgtttatcgctagccaatatcatcagtcctttcatctattcttggctactagtggctgacaacattttattaatttcgctcccttctataatgactagtgctttcaacagttttaagtttaacagtctcccaacaagaaagcgatatcttaataggttacttaagttttctttaataattttatttatgtcttaattaaaaagaaactctaccttcataaattggtagagtttctttttattcttgaacttaattacattcttatttcatttcgtgaatgtttgccttctaaaatcgtaacagcatcattcaaactaatctcgaccatattgcgaatagatgtttcggttaggaacgcaacgtggggtgtaacaagaacatttggcattgccgctaatttcttgtaatcatctggaatttgatctggtgtaacttgcttcccaaagaaagaagtttcgtcagctaatgtatctaggccagcacccgcaatttctttattttccaatgctgaaattaagtccgcggtatttaccagttttccacgagccatgttaatcaagtaagcattgtctttcatcatcttaaattgtggtgctgcaatcatgttttcggtacttggtaacaacggtgtatgcaatgataaaatatccgcattcttaacaacagtatcgaaatcggtatattcaacgtatggttcatattcgacattatacgatgggtcatacgcaagaacttttgcgcctaatgctttataaatctgagcagtggccccaccaatattaccaaggccaacaattcccacggttaaattgtaaatttcattactgatcaagtcatcgctccaccgaaagtcgccatggctcatgcgttgttcgaattcaccaatccgtcgtaacaagtacatcgcctgtgtgacgcccatttctgcgattgcccgtggtgaataaatagggacattcgttacaatgatgccatttgctttacatgcatctaaatcaaaaatatcaaccccaaccattcgagcagctaattgctttattcccatggctgctaattgttcatacagttgttcatccccaagttttgttgtttgctgtaaggaaattccatcatatccctcagcaagcttaactgtattagcatttaatggttcagtaaccatcttgacatcattgtctgtcttctttgcccatgcttcaatataaggcttttcagtatcacgaacgctatacattattaatttcatcagttttcccattcctttcataaaaactgcttacattaatagcttagcactcctttacttaattatcagtatttaagcaacaaaaaagggtctgtgacttaagccaagttactttcataaaagacaaatggcgcagtacaacaatggcctccaacgcccggtaaaaccgaacgttggaggcctactgttgcttgcgggggctcccagaggctagcttcgcgtcgaaaaacgaagtcacgagtgacttctgtctcgctccctctgttatctttaattattgttcaccgttgtctccttggtttgggcgacgttgttgaaggtgcatgccgtcataatcgccttctggtccaagtagttcttggttattatccaattctgagcgaccagcatagtgatggtgttgtaaccaaatcatgccaactaataacaatgcatagaagacaattgcgattacgatcagaacagtgttacagaacatcgtgtaatgtgctcccaaaccaccagaaattgaatcacggagtcctaagattgagtaagtcatcggtaagtaccagtgaattacattatagaacttcattgtaatttccattgggaaggtaccaccagatccacctaattggagcattaagagaaccatggcgaagaatcgaccggggttatcaaagagcattgaaaggaacataacaattgccattgaagctaacccaaagcatatggttgtcgcaaagaatgcaactgggtgaataactgtaagtccacaagccatcataattgcatcttccgcgattgccattgcagttactaccagtgatccaactgttaccttacttgcccaccaagcgattggagctttaccaaattcagcaacccgacgaattgggtaaacaaagttaaatacaagtgccccaacatagattgctaatgatagaacgtatggtgctaaggcgtgaccatagtttggtacataactgtaatccgtgtgcttaagagcagttggttctgcaaacatcttggcagtccgtggtgaagtcttaataccgttgatttgctttgcaccacctgcaagcgatgtagccagttgagaagcaccagcattcaaccgcgcaattcctgaaataagagcaggagaattatcttgaagttgttgagttccggcagctaattggtttacaccagcaataagagcaggaacttgaccgtttagttgaccaagcgcaccagctaattgagctgcaccagaattcaaggccccgctattagcgttaagctgggcaattccgttacccaattggccaactccggctgtatattgaccgattccgctagccaattgaccagctccggctccagcttgggcgaccccagctgtgtattgaccgattccgctagctagttgattagcaccggctccagcttgagcaaccccagctgtatattgaccaattcctgaattaagcgtaccagcaccggcagcagcactatcaacaccattagtgtattggtttacaccactattaagcgtgcttgctccagaagaaatccgacttgttgcttgtttaagttgatcaacagctcctggcattgccgctagggtacctttatagccatttaaggttgctaataatgagttaatagtcccatctgcattatctaacacagcagacatttgtgagagctgacctaattgttgctgcataccactcaagcttccttgaagattgtttaattgaccaagagttccacttaatccttgaatagcagcaacgttagcactagcattttgtacaatttgttgagcggccttcttagattgatcactagctttatcatcactaagaatttgttgtgctaatccagcaatttgaccatcgttaattgcaatacctttaagcttgtcaccagcaccggcagcaccagataatgctcccgaagcttgttgaagactagcagcactactttgaacaccagcaagagcattcttggcagttgccaaaccggtctggagttgacctagtccttgctgaagattttgtgcttgatccatggcccccataatcccgttaaagttaatgtttcctaattgactgttaacggttgaattcaactgattagcaccggatgctagttgaccagaaccgttccttaagttctctgaattaccacttaacgtattcaaaccactgcttaattggttagcaccggagctcaatgtacccgagttagccattaaagtatttaacccagcattcaactgactagcaccaaaatttaacgcaccagagttagccattaaagtgcttaagccactgctcaactggttggcaccggaatttagtgcaccggaattagccattaattgaccaacaccattgccgaggagactaaccccaccagtatattgcatgataccatttgctaaggtttggctcccggtagcaagttgttgagcaccagaagctaatggtgcaacactaacacgcaaggtttgaaccccgttatttacttgggaaactccggcaacataacgatttacaccatcacttaatgtcaccattccagtaccaatttgttgggcaccatcagcggccttgttcatccccttacctacaacatgcaattgcttaaacattaccgttgcgtaagcgttagtaacttgggcacgaattttttcatttagccgtgtcatcccagtttggacaattacctgtccaatgtagtttaaagaaccattagtttgataatgtaacttcatcgtcttgggatgtttttgtaaaacagtcgttgcattttcagagaaatccttaggaatcgtaacaacagcatagtacttacgatggctcataccatactttgcttctttagcggatacgaattcccactttaattgatgatttttcttcaattcatcaacggtctgtttcccgacatccattttccggccttggtactcaaccggaatgtccttatttaccaccgcaaccggtaagtttcgtgtacttccatacgggtcccatactgattttaagaagaaaatactatataggaaaggtatgaagcaaataaccgttactgatagaagcagtaaacggttatgaataatatgacgaaattcgcctttaatcatgctccacatttaatacttcacctcaaaatttatcctttcataattttagtttgttaatgacttggtagctgctctcgcaaaattaataacgtcctcagttggtacatcataattattgccttgccaccagtaaaaggtcccgataatagcgccactcaatacataagcaagcatctcgggattatcagacttttgcagcgccgttacaattggatcattagtctcaagattgcgccgctctagaagaacctgacttaaaatatttaaaatttcggtatacaaagagctccgtgcactattaggtgctaaatgacggataacatctttatttttatcaatgtatgataataattgcttaataatgtcatcttcagaatctgtattctccgtcaatttattaatttgtgcatttaacgtttgctctaagagatcgtacttatcactaaaatagcgataaaaactgctccggtgcatcaatgcttctttacaaatttgatcaaccgtcaaactttcaaaagaatttttctctaataacgttatcaatgcattttcaaagtcacgaatagttctcgtaacacgcataactcttccctccccaaataatacaaatttaacatgattattctaacttgttgcaattcagtacaacaggggtaattaaagataattatttcatagcgagacaaaaatgaccatttgtccgtaaaaagacttttgtttgtatcttaatcaaacgaaaacaataatatgctcctaaatttaaatggtcaagcacggcagtaataactttatcgctcttttatagtaaaacgtattaaataattattaacttgctaaatctcttttctaaaatacggtataataaaagtattaaagctatgcgattggaggcttcataatggcaaaaactaaaaaacatttaactaaatccaaagataaagtatttcttggtgtctttgggggtatcgctgactactttggtcttgacgaaaccctcgttcggataatcggaattctcattttcgtctttactggctttttcccgctaggagtcttctacctcttagctgccctcgtaatgcctgaatataatggcaataagacaaacaatgatgacaatatcgtcgacggtgaattcagagaaaaataatgttgattgcagcaaaaaagggactgtgacataagttaagttactttcataaaaagcaaatacgcagtacaacaatggcctccaacgtccggcaaaaaagccgaacattggaggcctattgttgcttgcgggggctcccaaaggctagcttcgcgtcgaaaaacgaagtcacaagtgacttctgtctcgcttcctgaactaatcttaggttgttttttaagcattatttcgttgtttataagctacttgaacttgtagtccataatcttcttccgttaaaattgttgagccgcttcgcccagcaatcttattcgggcccccagtaacaactactgttgcaagatacaattgatacttatcatgagcagtatggacatcggttaggccgattttggtaatatgaccaactgggcgccgttccatttggttcatcccgatgtagatttcaagacggtgttgcaactcatcatgaactaattcaaagtatggcggaacagattgtgaattcaaagccgtaactggtttttcagttgcttgatactgttcaacgatttctttttcacttagaccatcatagccgttaacaaacacaccttccattaatagttggtcaacaacacggtgtaagttatgttgttcatgttcgtcaattgctactgctgctgggatcgtgtcggcattagcaaacaagccatttgaccggtttgccaattctgccgctagtcgttgttgtgcatcaagaggcgtcttagctttgccgtcctcaaatttttgaccagtaatctttgcgacacgcggtgaaataaaatcaaatcgtgaagtcttttcaagaaagtaaaagacgaaattaagatagataaaatatgttaatccaatcactgctaagcaatataacaatgcccgtagccaaacatgattcataaagagtcggaacgtaacataaactaaataaatatcgcccagaaaagcaataatgatataaatacgactctttaactttacgtcaaggttaaagtaactcaatgacgagttaatcatatcaagaaaactaaacattaataacccgcctccttattattcagtcgtagtcgttccggtagtattaccaccagtcgtgtcttgtgtcgttgtattattgttagttgttgtaccagtcgattgtgaggtactgtttcgattagcactcgtactttcgtttgtatttgctgatcgatttgtcgatgcttctgtgccagtgtttcctgctgaccgtgtaggttgattagtatccccagtatcgtccgttgtattgttgctattacttgtccgggtagttgatgaattacttgcactctcatcattatcatcacgatcgctttgtgaattccgacttgattgattgctttcctcatcacccgattgctgaaattggcgacttgttgatactgatgttacttttgcaccctcagaagtatgcgttgctttattaactactacattggtggcacccaacgcaagtaccaatgatacaagtgcaaatggggttactaatggcggtatctttgctcccatgtctcattctccttttccagagtatataatacacgaaaactggcccaataaatatgaatttattgtaaagattttttctggcattgggcacatatcccgtgcaattcaaaccgatgcccagtgattttaactcctggcaactgtttctcaaagaatttcttatcaattggtggcatttgaatttcttgaactcgtccacaaatatcacaaataaagtgatggtgatgagtaaaatcacacgaatatttaacctgcatctgatcatgatgttgacgcaattcgacaatgcccaatttctcaaattctttaaaattccgataaatagtatcgtgacttaatccagggaattgttctcgaagatattggtcaatttctacaatattaaagtaacgatcagggtgtcgcgcaactgattcaatcatcattttacgttgcttagtccaccgcaaatgatggtctttaataatggcctgtgcttgatcaattaatttctccaatcttttttcctcccgattaaagatgatattgtatcatattttaattctttttggataatatctgcctaacaattatatctatttgttgtttagtatttttccattgatcattaactacaacatgagcgatcccttttaaagccgctggtaaagcaagatcacggtgatactctttgctatgtaaacgagaacgaatcgcactcaatttatcgccccgcagtgtcattctcttagctaaagaagccatatgggtaacggtcaagaaaataatcactgcttgagcatcaagttgttgatggtaagtaatcgcaccagctgtgtcaagaacaatcacatcattttccccttgtttccatccttcttctaaaccttctaatgaagaaccatattgaaactggtcataagttacttgctcaagtaaatggagttttttcagggaagtcggtgtttcaaaatgatagtctaccccatcttgttcccctgaacgtggtcgccgcgtcgtatgggtgattacccggtgcatatcataatgattttgaagatagttagcgatagttgttttacctgagccagctgctcctgtcacaataaacacatacttattatttttcataattgcttattttaaatgatcgttaacttgatccaataattcttttaaattctcgtaggttaaccgttcacgagcatcttgatagttgaaccatccacaattcttaatctcttctgcttgcagatgaatgtcttccttgttatctaactcggcagtataaagggtcatttgcttatgattgccatttggtaagtcgtattcggtatacaccttaaaacttgtatcaattggtaattctaattgcgtttcttcctttatttcacgaattgctgtttcttctagtgattcattgccttcaacgtgacctttcgggaatccccagaagtgtcccttattttgactctctaagagtaaatactcaattccattttcaccttgacgatatacaactgcgccactagtaacttcaattgccatttttatccctcttttgtaattaaatttttctaatttacttttaatattaactacggtatcattattaattataaacgtggcgaaccatttcggcacgtacaatttattatagcaaaggtgggttaaagatgagcttaaacattatgcgaaaagaaagtcttgatcgatatcttggtgaagacaagcttttcgttaaatcaatgaatgctcgtgatctcatggcaattgggatcggtactgttattggtactgggattttcattctccctggaacaattgccgcaaattcagctggaccaggagtgtcattgtcatttctgttttcagcgattgtctgtgcgctagctgcaatgtgttatgccgagtttgcttctgcattaccggttgctgggagtgcctactcatacggaaatgtagtgtttggtgaattccttggctggttgctgggctgggcgttggttcttgaatacatgttagctgttgcgtctgtttcaacaggttgggcagcctacttcaatacattgcttgaaggatttggtattcatctccctaaagcactctcaggtccatttgatccagctcatggtacctacataaatatcgtggcggtcgtaattgttcttttgattacagtaatgcttgcacgggggatgcaatcctcattgcgtatcaataacattgctgttttccttaaaattgcaattatcttgatctttattattgttggtttcttcttcattaagcccaaaaattaccatcctttccttccataccacatgaagggtgtgattcacggggcaacgatcggtttctttgcttaccttggtttcgactgtgtttccagttcggctgccgaagttaagaatcctaaacgaaatatgcctctaggaattattgggacacttgctgttgcaacaatcttatatactggtgttgccgtagtcctaactgggatggttaagtacaccaaacttgacgttgccaatccagtggcgttcgccttacagatggttcatcaagactggttggcagaattattgtcaattggggctttgatcggaatgttcacaatgatggtttcaatgatctattctagttctcgtttgatctatgcaattggtcgtgacggtctgcttccttcattcttaggaaagcttgataaaaagagccactcgccacaagttgcattatggatcgtggcgattattatcgctatcatgggcggacttgtttcccttgatcaacttacaagtttagttaacatcggaaccttgtttgctttcatgctcgtttcatttgggattattccgcttcgtaagcgaaaggatatcggtaatcgtggaggctttaaggtgcctctctaccctgtgcttccaattctttctggtctcgcctgccttggcatgatgacccagttgcaaaaagaaacatatattggagcagcaatttggtttggaatcggaattatcatctacttcacttacggctactggcacagtaagttagcagataagaattaatagcgtgaactactcggccataaatgaccgagcttctgggaacacgaagtagtatttaggatattacacaagtattcttgctacctaacttacagaactccgttcttttaccaaggctagttcctagccaacggcttttaatcctttttgcaagatgttaactgccgcattaacatctcggtcgtggtgaacgccacactttggacaagtccattcgcgaacttcaagtggcttcttgccactgttaaagccacaatgcgaacagatttgactggtatagtttggtttcaccaagactagttgtttgccataccaagcacacttgtattccagcatcgtccggaactgataccaactagcgttagcgatcgacttcgctaagtggtgattcttttggagattcttggctttcaaatcctcaataacaatcacgtcgtactgcttaactagagccgtcgttagcttgtggaggtaatccttgcgcttgttggcaattcgttgttgataatgggctttaacaagtcgggcgcgttgccagttctgataatcattgagtgctaacttggtatcttggtggttgtgattccattggcgaacggcaacggttgcccggtggcgccgcttgctgaatttactttgccacttcgttacttgatgttctaacaatttagcgttgaaggtaccgtacttgacaccatcagaactaatcgcaaggtcggccaggcctacgtcaagcccgaccatttgccccgttttcggtaaccgttcaacggttgtttcaacttgcagggagaggtagtaacgacccgtcgggtcataactgaccgtataacgcttaattttggcctcaccaataagagtcgttttactcgtgcgtatacttccgagttttggtaattgtaaccgccgcttggcaagtaccttgcacgttgatcggccagtgtaggcctgataggccacatggcggctcttaaagcggggatagccaccttggtgcttaaacaatcgtttaaaggcctcggtaagattatggttcaccactaggaaactggtggaatcactttccttgagaaagggatattcacgcttgagctgtttcaagaggtagttcataccatactcattgacgaagtggctactgggattgttttggtaacgctccttagccatactgagcatttggttccaaacgaagcggtcattaccaaacatttgccataactgatcccgttgggattggttagggtacaagcgaagtttgatccctttaatgaccttgttcattctagttccacctcctttttccgttgatcatcaatgtacttggcaacggcttgttcattaacggccccaatactttcaacatagtaactgggcgaccacaagtgacggccctcctttttccaatagcttcgctgtaattccggacattcccgaaatagctgataggcagtaccgcctttcagccaacgaacaatattcgtcaccgataatttgggtggtgcactcactaacaagtgcacatggtcgtccttcccaatttccatgtgggcaatttcaaagccatatttagcggcgatctcatggataatccgtttgaaggcgatctcgacccgaccggtaaggactttgtttcggtatttggttccccaaataatgtggtaattaaggttgtagaccgatgttcggccatatgtaagtctgtttgtatctttcataccaacgattataccataattcacgtttcccatatacgcccgtcgggcgtaaaaaaggggggcaattcatcacgtccttaaaagaacgtgtttccttgccccttttcaaaaaatttaagagttacgtagagagtgagaaaattatttttccactccctttttatttaagatagtaatttgcattaaataccattttttgttaaggtagtattacttacttttttattcacaaggaggaatcaattagttaggccaaattttgatcacatacgcctaattttttatggaatatacaaagaagaattacaaaaaagcacctttatcatcaattcattttcgaatatattttgccttggctcttggacaaattgcttgtggttttgctcttggaattagtggaactgccctttcccaagcaaccgattatatcaatattaccgacttttgggttggcctaattggtgctgggagtttaattggactcgctgggagtgctttaatgggtaaaatcgctgaccaatttggccggcgaagaatgttgatgctcgatatgtatcttttttctatattttctcttttacaattagtaacaatgaatcttattatcctgtttatcttacggattttaattggtttaatgattgccattgactatactgttgggaatgctctattggtagaatggttaccagcaaaagaaagcggacgcctacaaagccaactaatcatttattggacaattggctttattacttcatatattgctggaattttagtaacagggtttggtgttcataattggcaagttatccttgcatcaagtgtcgttccgggactgatggctgcaatctatcggtcaatcttccgaattcctgcatctccgagctggttagcaagtcaaggtaagaataaaactgctcaaaaactaattcaaaaacaccttggaaaaaaatggggattatcattaaaacaaattcgtagtaaaaagccaaaagctgtctctcttaaaaccctctttaatcccccttatcgccgaaaaaccattgttggtggtttattctatgcttgtcaggcattttcatttttcggtatcagtatcttcttaccaattctcctaaaaagtatgaatcttggtaataacaacctctctgggattatctataatagttgcgtccttatcggtgtaattttcggtagtttaatcttcaagattcttagtaggcggatgtttttggtaagaacatttttcctttcagcagcagccctcattttattaataattggcaataacttttcacctttcttccaaattagcgtttttgcgatctttgcgatagtcttatcctcaggacttgtccttgattatccatatccaacagaactatttgatgttaaggttcgagctagtggggttggtacttgtatcactatcagtcgttttggagctgctagcggaacattcttattaccaatcttaactcatctcggcggtccaattttagcaatgctaatttgtactcttgttttacttataggtggtactatctgtcttttatgggcacctgaaacttcaccaaaatatatttaacattaataatagaatggtcgggaaaattttaaatttttcactgaccatttttagttttaaacatcaatccaatagactaatcaatttttaacaattgaactactcccacttagctaaacctacggtttaatgcttgaagtgggagattctggaaacatcgcatacttaccctaccgattctgaacgaaccttcaagcagaggttacgactattagccaaggctcgtcccgagcctaactttatctatcggatagctaatcctttttgcaagatgacttgtgcagcgttaatatcacgatctaaatgtttaccgcagtttggacaatcccactcacgtaccgctaaccattccgatttattcaatcctaaccgatgattattcttcccacaattagcacaaatttggctagtatatgacggattgacctgaataagctttttaccgtaccagtcacacttatattgcaacatatctactaattttgaccagctagcgttagcgattgctctagctaaatggtgattcttcatcattcccttagtattaagtttttccaacacaatgatgtcgtactttttgaccaatttagtagtgaatttttgtagctgatccaaccgttggttggcaatcttttgccgatacttcgccaccataatacgagctttctgataattcttaaaatcatctaattgccgtggaactaacactttattatgatgatcccaggcgatttcctgctgagcctttaagaaccgacgactacgtaatttctcccaacgatacaactttttatggtatttgtcttcaaaatgattgatcggttccttgcatccatctgaaagattaagtaatgacttaagtcctaaatcgccaccaatatatttacttgttttaggaagagtttggttttcactttccactaaaacagtaatgtaatattgaccagcaacgttcagacgaacagtgacattcttaattttacccattggcaatcgaccagctctaaaatagacgataccgagttttggtaactttatatgatggcaatctaaaactttaatattgccattaacgtactttgaattgtagctctgagaatattttctggatttaaatcgagggaacttattttgacctttaaaaaagcgttgaaaagcatcggctaaattgcgattagcactttgcaaagcagttgattctgcttgtttcaaccaaggatactcaaccttaagttgtttcaacagattattcatcccaaaggcattcacaaatttagcttccggattattcttgcgccgttcaatttgcatattaagcatttgattccatacaaaacgaacacaaccgaaggtttgccagagctgattttgttgtgctgaatttggatagatgcgcattttaacggcttttagaaccattattttctcccttgactttcaatatatcgttttacaacttctaaaggcgctccaccagtgctaattaagcaatagctttgtgtccaaaaggctgatttccaaagatattgcttgatttctggaaattgttttttgaccattctggagctagacgatttgtaagcatttaaaaatttagccatttccgtatgaggcgttgctctaaacaaaacatgtacgtggtcctgatcataattccattcttgcaaattaatgccgtacgcttgtcccacaactacaaaacgatgtttaagatattcagatatttcatcgttaattacttttcgacgatacttaaccaccattaccaaatggtaattaagcaagtatactgaatgctgatttctatctaattctattgttatcaccacattttatagatatatactaaatatatcatagaataaaagaaaaagcactaacgtactttaagagagcgattcatcccctacttatagaagtgggggatgaatcgcaaatttatggataaaataatttgattacaaagcgaaccaaatacggatagtttttgattaatactgctatatttatcgggaacttgttttcgtgcccactcctaataagatggcacaaaagactgttatagcggttccaagcaaatataggcggtatacgttaagaataagccaagagtaagacagataagggtagtcttatagcgagtagttaatggaatcttttgcaatttaggactcaatgcgcctactaacattcccgaaagcatcaattcgataaaaacaatgaaaatccaataagctttattctgttgaaaagcaaatagtaaagtatagataatgacataattcttgatcgctccgagccaaatacgaaatagtttaaaaggttgttccagaatatttcgtagttcaaggataatcccaataattgctagcacgattagggcctagccaaaatcagaaatttgacccgtcttcttaaagaaactaataataaaaaccacggtaagcacagcgatggcaggaaaagccgtttttaaattaaaagagaattttaaatccaatggtgtcttatctcgtttaacaacaacgtaagcgtaaataacttccaagcccaggaaaaaagtataaaaaacaaaaccgacaactaacggcagcttcatcagtaaaatcccgagggcgatcagtccgataattacactaaagcccgcgataacatttactcgcttcaaatcaatcccggaaatttccttattgggatcgccgagcaattttaatcctgtcacgccaaaaccgatcaagatcgccgccaatctagcaagccactcaaagcgaaaataaattccaatagaagcaaggactcccccaataaaagcaataactgaacaaaacttagtaacacctgaccaagaagctaaatttaggcgcccatcgagaataaaaggcattactttttcaacggtgtaaacaaaaatgaacggccaaacaaatgtgattatatttgcatgggcaatgatagagaatgcaaatagtaacgttggaaatagaatatagcttcgagctacaaattcatggttaattgctaaaatcttcttcataagcagcctccgatcactttaccttttatttttagtaaaccacatccccttataaaagaaaaataataggactcctaacatgatttttaatgctagaagtcctagtagctttttatttagcaaacatcttaaattctaaaaataaatcattgtattcacctaaaacgcgtaatggcaaatcacgatatacttgcaaatgcttcatcgttgtttcaggaggatagaaagctttatcatcggtaattttcttgggtaattcttttttagccgctttatttggtgttgcgtatccaacgtattgagcattttgagccgcattttggggatctaacataaagttaataaattcgtaagccgcctttttattacgtgctgctttaggaatcaccatgttatcaaaccatatattgcttccttcgcttggcacaacatagtgaaggtgcggattaatattcatcatttcgcgcgcgtcaccagaataggtcacacccacggctgcttcattttgctccatgtacatcttcatctcatcagcaataatcgcttttacattgggcgtcaactgctttaaatgggcctgcgcaagcttcaattgatggtagttagtcgtattaacagaatgatgctgggtaataagggcaaccgcaaacacatcccgcgcactatcaatcagcatgacattattctttaagcgcggattccaaagttgttcccaatgctggacgtctttgccatttactttttgatcattatagataatacctaacgttccccaaaagtatggtacagaataacgattgtcggggtcaaaagaacgatttaaaaattgcggatcaatatacttaaggttaggtaatttctgatggttaagaggtgcaattaaatgctcctttttcatccgttgaacagtgtattcactcggcacaacaacatcataattagtcccgccttgccgaatcttggttaacattgattcgttgctatcaaaggtttcataatctacatgatagccagtttgatgttcaaatttcgttatcaatgctggatcaatataatctccccaattgtaaattgtcagagtttgttttccaccaccagttttttgctggttgaaagcaacatccccaagcgctagcaaaatacaaataacgataattgcaaggaatgcagtaaatatctttttcattgtgcatccccctctttaacagccacaatccgtgtccgtcgaccgccccgtttactaataaggtaatagccaattactaacagaagcgaaacaataaacatcaacgtagagagggcattgatttcaaggttaattccttgccgcgcccgcgaatatatttccaccgataatgtcgagaagccatttccagtaacaaagaaggtcacagcaaagtcatcaagtgaatacgtaaaagccataaaatagcccgcaaaaatacccggggcaattgacggcagtactacccgagaaagaacttgccagcgactggcccctaaatcataggcagcatctactaatgttggggacatttcatttaattttggcaacaccattaaaacaacaattggaatacaaaaggcaatatggcttaagaggactgagacaaagcctagtcttacccccagcatggtgaaaaagattaaaaagcttgccccaataattacatcgggcgagaccattaaaacattattcaaagataacaaactattcttccacgggcgccgtgcatccttaattgccaaggctcctaatgttccgataatcgttgctaatagtgacgccaaaaatgctactaacaaggtattaataacaatggtaatcattcgcgtatccgcaagcaaatccgcatagtgttgccaagaaaagccatggtatttttccattgtttgtccgctgctaaaggaaaaaacaactagatacaaaattggcgcatataagatcacaaaaactaatgccaggtacgcttttccccatgaccatcgctgctttttcattaatggcgtcctcctttctgtttcttatcaccagtcataaacataataataaacattgcgataatcagcacgaccccaatcgttgaacccattccccaattttgcgttgtgaggaaatgttcttcaatcgcagtccctaaagtaattacacgatttccaccaatcaaacgggtaatcataaagagggagagcgatgggatgaagaccgcttgaattccagcttttacgcccggcatagaaaggggccaaatcactcgacgaaaggtttgccaatgagtagcacccaagtcatagctagcatttattagtgacgggtttatttcagccaggttattgaaaatcggcaacaccataaacgggatttcaatataagcagccacaaacataaaactggcatccgtgaacaaaagctgatgactcccaaggcccataaactggaggaaaccgttaattgtccctgttcgactaaacaagccaataaacgcataagtcttcaataataagttgatccatgttggcaaaatcaccagcaatagccaaaactgcttattaggcaatctattcaaaacataagctgtcggataactaatcaccaatgtcacaagggtaatcaaaaaggcataccagacagagttaagcgtcatcttaagataaacacccgatgtcaggtattcagcatagttattaagggtcagctgaccattgatattaaaaaatgattgataaaagatcaataccaatggcgcaatcacaaataggataatccacaatgcatatgggacgataaacatcgctttttgccgcattagtctccctcctcgtagctatcaaggcgagcatcaaaatcttcttcgctttcgttataccgcataacgtgaatatcttcgggatcaaatgtaatccctactttagcccctacctttgttttatgaatagaattaatcttccacttatggttacgttggtcaatcaccgtaatttgataatcaacgccacggaaaagctgcgtttcaacagtgccgactaattttcctttctcaaccgtcgtaatgtcaagatcttctggtcggatgacaacttcaaccttttcgtttggtttcatccccgcgtcgacacaatcaaagtcttgaccattgattgaaactacatagtcttttttcataatgcctgggacaatattgctttcaccgataaaatcagctacaaaatggttaagcggttcatcataaatatccacgggcgtcccactctgctgaatcttaccatcattaataatcataatctggtcactcatggctaatgcctcttcttggtcatgggtaacaaagataaatgtaatccctagccgccgttgcaattgccgcaattcagtctgcatttgaactcgtaacttatggtccaacgcagacaaggcttcatccaacaatagtactttcggcttattaactattgcccgggcaatggcaactcgctgtctttgcccaccagacatcgcggtaatttcccgatcatcatagccatctaattgaaccaggtgcaaagcttcttttacgcgttgtttaatttctgattttttgacacccttaatttgtaatccaaaggcaacgttttctgccacattcatatgagggaaaagggcgtaatcttgaaagacggtattgacttgccgttgattggctggaatatcattgatttgctttccatcaaaataaatttttccactactaggatgatcaaaaccagcaattaagcgcaaaatcgttgtctttcctgatcccgatggtcctaataaggtatagaatttaccggcctcaatttcaaagcttatatcacgcaacacaacgttatcatcatactgtttgcttacatgctgaaattccattatgttttttaccatcagcgtttccccaatcatcattttttaaactaagtcttagtataaagtatacgccttaaatcgcaacactgtttatcctaagcaaattattttgaactactcccacttagctaaacctacggtttaatgcttgaagtgggagattctggaaacatcgcatacttaccctactgattctgaacgaaccttcaagcagaggttacgactattagccaaggctcgtcccgagcctaactttatctatcggatagctaatcctttttgcaagatgacttgtgcagcgttaatatcacgatctaaatgtttaccacagtttggacaatcccactcacgtaccgctaaccattccgatttattcaatcctaaccgatgattattcttcccacaattagcacaaatttggctagtatatgacggattgacctgaataagttttttaccgtaccagtcacacttatattgcaacatatctactaattttgaccagctagcgttagcgattgctctagctaaatggtgattcttcatcattcccttagtattaagtttttccaacacaatgatgtcgtactttttgaccaatttagtagtgaatttttgtagctgatccaaccgttggttggcaatcttttgccgatacttcgccaccataatacgagctttctgataattcttaaaatcgtctaattgccgtggaactaacactttattatgatgatcccaggcgatttcctgctgggcctttaagaaccgacgactacgcaatttctcccaacgatacaactttttacggtatttgtcttcaaaatgattgatcggttccttgcatccatctgaaagattaagtaatgacttaagtcctaaatcgccaccaatatatttacttgttttaggaagagtttggttttcgctttccactaaaacagtaatgtaatattgaccagcaacgttcagacgaacagtgacattcttaattttacccattggcaatcgaccagctctaaaatagacgataccgagctttggtaactttatatgatggcaatctaaaactttaatattgccattaacgtactttgaattgtagctctgagaatattttctggatttaaatcgagggaacttattttgacctttaaaaaagcgttgaaaagcatcggctaaattgcgattagcactttgcaaagcagttgattctgcttgcttcaaccaaggatactcaaccttaagttgtttcaacagattattcatcccaaaggcattcacaaatttagcttccggattattcttgcgccgttcaatttgcatattaagcatttgattccatacaaaacgaacacaaccgaaggtttgccagagatgatttcgttgtgctgaatttggatagatgcgcattttaacggcttttagaaccattattttctcccttgactttcaatatatcgttttacaacttctaaaggcgctccaccagtgctaattaagcaatagctttgtgtccaaaaggctgatttccaaagatattgcttgatttctgggaattgttttttgaccattctggagctagacgatttgtaagcatttaaaaatttagccatttccgtatgaggcgttgctctaaacaaaacatgtacgtggtcctgatcatgattccattcttgcaaattaatgccgtatgcttgtcccacaactacaaaacgatgtttaagatattcagatatttcatcgttaattacttttcgacgatacttaaccaccattaccaaatggtaattaagtaagtatactgaatgctgattcctatctaattctattgttatcaccacattttatagatatatactaaatatatcatagaacaaaagaaaaagcactaacgtactttaaaagagcgattcatcccctacttatagaagtgggggtattctcgcaaatttatggataaaagtgcgataattaatatatcaaattttatacgaggtgttccagatgaaaatcaatcaatttagtattacttcgactacaccacaggcacggcgccaagaattaatgcagattcacttgcttcggaaaaacgaagaacaaaatttaacaccgaacgcaatgtttgaaatcttcttagcacgaattcatatggcaagtgcccagccgatcatcactaaacagtggcttcatgacctattagctactcctgaccttgctcttgatgattggtttgaccagaatcaaatattaaccgatgaagtattttacctcgtcgctctccaactactcgattttgaggccgcagttgattttgatattacagatccccttgctacagttaagaaaattggcttgccagtcgaatcacatcaaaaatggacaaccgcaaacgttaccgatgctttttaccttcttttaaatactcataacaaaaatggtcaatcgcttattgatcatttaacggcagagggctttatggcttggagttaccagcttccagctgaacaaaaaccactctttttcaatggaaagccacttgctagttttgaccctgctaaattcattcgtgaggttgtttacattgagaccgatatggatactgattttgatggtaaagcagatttagttaaagcggaaattatgcggccaatcgaatcggaccatggactaaaagttcccgttgtctttactgctagtccttataatcaaggaacaaacgatgaatggggcgaaaaagcaacgcataacgtcaatcttcctttgaaacataaggatcctgattatcaggccccgactgaagaaaaatttccgactgacttttcacgccaaaaagttactggcgaaagccggcaagctactgagacatttagtaccacgccagcctacacactaaataattacctcgccgcccgtggttatgcggttgtttattcagccggaattggtaccaaagattcggatggtctgcaaacgtgtggttcttcagaacagactgatgcgatgaaggctgtcatcgagtggcttcatggtgatcggcaagcctttactgaccgtcatagcggtaccacaatcaaggcgacctggtgtaatggtaaagtcgcaatgacaggacgctcatatctcggcactctagccaccgctgtcgcaaccactggtgtacctggcctcgaagcaattattagtgaagcggccatttccagttggtatgactattaccgggaaaacggccttgtccgggcacccggtggctttcaaggggaggacgcagatgttttagctgacgaaacattcagtcgaaccaaacgtccagcagactaccgccgaattgaaaaagtaaatgataaatatattgctaaaatgcaaggagcaatggatcggacgtctggtaattataacgagttctgggaccaccgcaattatcggcatgatctcgaaaacatcaaagctgccgtgatgatggtgcatggccttaatgataccaatgtccgtcctagtaacgttaaagcactttatgacggcactcaaagtttgccgattacaagcaaactcatccttcaccaaggacaacatatttatatcaatgcctttcgttcattagatttctctgacatggttaatctctggcttgctaataagctctgggggcaagaaaatcatgctgatgataccctgccaagtgttcttgtgcaagacaatagcacccccgaaacttggaccgcatatgatcaatggactgcaggcgaacaaaaacagtaccaatttaacgaccatcgcctaacgaatttgcccggactaggaatccaaagctttaatgaccaacaaccagaagaaaagtaccttcaatggtgtaaacaaccccaagcatgggcaaaggcactcgtgaatgataacggtcaatttagtcggcgcttcgtaactgctgtatttaataatgatacgcttctccgtggaactccgactgtcacattaaaagtagcttcttcgaaaaattatggaatgattagtgcccggcttgttgacctgggcagcagcaaacgccttacaatgtcgcctgttttgtttaatcgtaatggtcttgagctaggttatcactggaagacagatgaccttcgtgaatttaaattagcaaaagaaataactaattataaggtaatcgcaagtggacatattaatttgcaaaatcgaaacaatccagcacagattgacgaattagccgctaatcaatttgtcaccgttaagtttgatcttcaaccaattttccaccgaattgtagctggccatcaattagggatcattatttatagcactgattacgaatacacgcttcgtggcaacgaacggattgaatatcaattagagctgaatggctgtcatcttgacattcctggcttcagcgttttagcttaaaaagacagcgcgttaaaactagttttagcagaattcagctaattgcggtagaatagttagtattaccaataaaaaggagagattcgagaatgaaacaaggcactaaaattattacccttgataacggctatcatctgtggacgaatacccaaggtgaaggtgatattcatttattagctttgcatggggggcctggtggcaatcatgaatactgggaagacgctgctgaacaattaaagaaacaaggtcttaacgttcaagtaacaatgtatgatcaattaggttcactatattctgatcaaccagatttttctgaccctgagattgcgaagaagtaccttacttacgaatatttccttgatgaagtagatgaagtacgaaaaaagcttggcttagacaatttctatcttattggtcaaagttggggtggccttttagttcaagaatacgctgttaagtatggccaacatcttaagggcgcaattatttcttcaatggttgacgaaattgatgaatatgtcgaccgggttaatgaattacgggaaaagactctttctccagaagcagttgcctttatgaaagaatgcgaagccaagaacgattacagtaatcctaagtatcaagaatacgttcaagtaatgaatgaacaatacgttgaccggaagcagccatccaagctttatcatcttaaagaccttggcggcacagcggtttacaacgtcttccaaggtgataacgaatttgtgattaccggtaagcttaaagactggcatttccgtgaccaattgaagaatattaaggtgccaactttaattacatttggtgaacacgaaacgatgccaatcgaaactgctaagacaatgaatagtctcattccaaattcacagttagttactactcccgatggtggtcaccaccacatggtagataaccccgatgtttattacaagcacctcgctgacttcattcggaatgttgaaaataatacgtttaataattaataaaaagaccgaggaaacgtttctcggtctttttattaattattcatgaatcatattttaaaaatatcttaactagaactaaaatattaaatgaatatggtacgatatttatacgataaatacgaaggaatgattaaagcaaaaacttaatacggcttcactgatgttgttcgcttaaggtgtgggacctttaagcattagttactttactcaatttatatatttaaggggaaaaatgaaagaaaattatcaactaacaactgacgaaataaagaaagaataccaattaactgattttactcacggcctatcaacccaagctgtcgaaaaacggcttgccgatgaaggacgtaatatcattgaagtaaaaccaacacccaagtggaaactattcttacgccagtttaacaatattgttatctacattttattagccgctactttactgaccgttttaattggtcactatactgatgcgattgttatcggggcggttgtcattctaaacgcgctcattggttatttccaagaatcaagcgcagcgaatgccctcgccaaaattaaagagatgatggcgcaacatgccaccgtctaccgggatggtaaacgacaagatattgatgccgcggatcttgtccgtggggatgttgttttcctcgaagccggtgataatgtaccagctgatttacggattgtctcagctgataacttacgaattgaagaatcggctttaaccggtgaaactaattcggttatcaaaactgatgaagcaattaccgaccaagacgttcctctcgctgatcgtgttgatatggcatatgcttcgacttcagttacaagcggaagtggcctaggagttgtagtcgcaactggtgaacaaaccgaaattggtaagatttcacaagaagttgcgcaaatcaaatcaaagaagaccccattaactaaagaaattgaccatgttggaaaggtcgtttcttacattacaattactgcttcagtgattgttttcgttgtcggtttcttcctcgaaatttactccttgcctgcccttgcgcttgcagtcgtggcaatgttggttggtgcgatcccagaaggtttgcctgcaattacctctgttatcttagcctttggtattagcaaaatggccaaagagcatcagacaattatcaaatcaatgcctgctgttgaaacattaggctcggtcgatgttattgctactgataaaacaggaactcttaccaaaaacgaaatgaccgccattgagttatgggtcggcgataaacactacacggttaccggaactggttatgctcctaatggtgagattctcttaaatggcaaaccagctcaactgacagatcagctcaaacttttcttagaggctggataccaagcaaatgatacggctttaactgatgaagacggcacctggcatattaatggtgaaccaactgatggagccttcttaactctttatcacaaagcgtttggggctaaatatcaatcgccatataaagctgttgacctccttccatttgattctgattaccgttacatcgctgaattaactcgtgatccagaagataaacaacaagtaatctttgttaaaggatctccagacaagctctttgaaatggccgcaaaggaagatccacaatttgatactgccaagtggcaacaacgggtagatgactggtccaaagccggaaaacgagttattgcggttggctatcaacctgttaatggcaaaaatctaatagaagtcgaacatgaccacctctacaggggaattcacttacttggcttagctgctcttcaagacgcaccacgcgaagaagtgattgttgcgttaaagcaaatgaaccgtgctggtgtttccattaaaatgattacgggggatgacccgcaaaccgcccgtgcaatcggtaagcaactaggcttatcgacgggcccgatcaacgcaatcacaggtgcagaatgggataaactttctgccagtgaacgagaagaggccgctttagataaccaagtctttgcgcggacgactccacaaaacaagcttgaaattattgaagcgctccaaaatcggcaaaagatcaccgcgatggttggggatggagttaacgatgcacccgccttaaagaaagccgatattgggatttcaatggggatcaagggaacggacgtcgctaaagatgctgctgacatgatcttaggaaatgataactttgcggtaatggctgctgttatcaaagaaggtcggcgaatttacgacaatatcaaaaagagtatcttattcttattaccaacctcctttgctgaaggattggtggttgccttctccattcttactggtcagcaagttcccctccaaccagctcagctattgtggattaacttaatcgccgcaatcactatccagtttgcgttcgtctttgaaaaagcagaaaagggcatcatggatcgcaatccgcgccctgtgacccaacgattaatgaatcgacatgatttaatccagatgggttatgtctcagccttaatggcgctgttcgccttaattggttacgaatggttcatcagtgctggggcagacgttgtcaacgctacaacaatgatggttaataccattgttattagtaaggccttctacttcttcagcattcgaactgaacgatatggactaaaagaagttggaaatattggcaagaaagcctggggcgttattggattgatgattcttttccaattgatcttcacctacgttccatttatgcaggctgccttccacgtgaccggaataagtttactggaatggctagcagtaattgtcttctcttgcttaatcttcttatgtactgaatctgataaaatgattcgtttccgtctaaatcgacggtaaaattaacgccactgaatgagatttttcatcttcttcagtggcattttttaattcataagctttcgtaatgttttgaccaaatctatgtaagcgtattccaaaatctgatataatatacctaacacatagaaaaggagtcttatcatgaaatatcaagaaaccaaagaaacacttaatcaattagttgctgatctgagtcaaatggcaatgataattcatcaaactcactggtatatgcgtggcactaactttctaaagcttcacccattaatggaccaatttatggatgaaatcaacgatcaacttgatgtaatatctgaacgattattaactctcgacggtgaaccttattcgacccttaaagaagtcgcaacccatacgaaaattaaagactggccaggaaactttgataaaacaacgccagaacggcttgcgcatttagtcgctggttatcgttatcttgaggacctttatcagcatggaattgaagtgactgacattgaaaaagattattctacccaagatatcttcattggatttaagacggcaattgaaaagaaaatctggatgctgcaagcagaattagatcaggcaccagaaattgacaactaataatgaaatcggcaccaaactaatcgagattcgaacgtttggtgccgatttattgtctaaaaattattttttctgattatctaggagtccttctttttcatcttttaatcgcaagtcatcaagccattctacatgcttttcttcataactacgatctttcttgataaagaagtatgctaccgcggcaagaatggcgatgacagttccgacaagcaaggtcttagccgtaaaattagtaaccatgtaacaagaaactaacaatgcaaaaatggggataagatatttcctgggtaatttgaaaccatgtgttggatattcgttactatgttcaaatttaatgacggcaagaattgagggaacatattgaatgaatgaagctaagactgtacaactaaccaagaagagataactctgggtagcgaataaagcagaaaggatggatgttaataaaattccgactcatggggcatcattcttattcttcttcccaataaactttggcaacatgccgtgctcattggccattgaagtaattaacgatggcgtgttaaacgaagatgaaaaggcaaccccaaagatacttacaagcatcccgaaaataataaaggcatatccccacttaccaatagtggttccgagtcctttcgcaagggcacctcccaaagcattagccagtggtgtcgagtagccgcctaatttagtcccggaaagtccaacggcaacggtcatcatcaatgcatccaaaatagttacactaaccatgactgcaattaacacccgaggaatattcttttctggattcttcatttgcttagcagcaattggtaaaaatgaaaaaccagtaaaaagataaaagatcggggtaaaggcttcaccaaaatgatgaataaatgacattggtccctttaaagctgcttggggaatcactggtgagaagttagctttatggatgaagaagaccccaacgacaataaagatgatcagcgtaaggatcttcgcagccgctgatacattattaaccagtttaacaaggccgtggccgaagaaattaataactgcaaagagcacaattaagccaaaagcagcggctccatagataagcggccgattaaagattggcaaaaagttcttgagggtagttaataaggcaacaatttccgctgaatgggtacagcagcctaagaaccaggtaaaaatccctaactcataaccggtaaatcggccaaatgcatgataagaataaagccatgctgcacctgagccggtaaaacgactagaaagatcggcataacatagggcgatcaatgaaacggttattgctgtacatagcaaaactgctacagccgataagttcatgtaccgataaataacagatggcagtaaaaatgttcctgaaccaattactccattaattcctaaaaagtaaatcgaaatgaatgatagctttttaggtactgatttttgattactgataatgaccaccccacataaaatttataattccatttatattgtagtcttttcaaataaaaaggtaatttatcagctattctaatctcaatcttttctgaaattgttatacaattaagaacgtacttatattttataaaggatgaataaaatggcacagaagattgagaattttatttttgatattgacggcactttaattgatactattgatatgtatatgccagcaatgattgatgttttagctcaacatggtcacccagttgcacccgacaaagtagagcaaactaagcatgacttatttggtattacgggacaagatgccctccgtcttgctggaattagtgaggatgaaattccggcgatccaacaagactggtttaagctggcttatcaacgtgctgatcaagtaaaagtgattgaaggaattccggaaatgcttaatacccttgccaatcgtgaagatgcaaggatcgccatcgcaacttcaaaactcgctgacgaataccaagaatacttcgttaacaaatatgactttgcaaagttatttaaggttgccattacgtctgctgatactaaaaagcataagccagctccagatcctattttagcggcaatggataaaatgggagcagatcccgccactactgtttatgttggagacacgatcaatgatatgaaagccgcccatgcagctggtgccaagtttgcaggcgccctttactcttctgcaaatcccgatagtattaaagatgcggacttcccattaatgaagcccgctgatctcttagaaatttaaaacaaataaggagtctctggtgtttagaattcaaacgttagagacttcttttaattgttattcatgtccaccttaagaattttattaataatactactttggagtctttacatgctctgcaacatattcttgagccgttttttctggcatttggtaaacattaacgagagcgaccactatttctgacggtgcagtcttttgactggctaaaaacttaactaatttttgtttcgactcttctctttcttctcgccgtgcgtccattaaatcaagctcgaacttcataaagcctcgtctcctctctggctcctgcttaatcttaataatctcgtcttgaatcttaataataaacttactcttattgtctactcgactacgcattaaagcaaggaagttcttaatcggctgctcatctttagtaaattctttagccaaggcattaaagatcacaactgtccgttggtcgcctaatttcaactgatgattacaagtacacgccatttcaaacacataacgggcccaaccatagccaaaataatcaaaatcacaaaacatgagcacataggtcggatgaagacttaaatcgcgataatccttgcccggcaagagtaatccatgatctatttgctcttgacaataccgcaagcgataaggcaaattctgtcggtcagctacctgcatctcaataacaataatgttgccatcttcatcctacacataaacatcataacggacgcgccggccagctacgacattaatatccttttgagttgttaactggacgatttgagttgcctttaaatggggtaatgcacgattaatcaattctaaacaaatttctttattctgcataaccatcccgaacattggatcactcgtaatagtcatcttttcccacttttcgagggccttttcatagttctctggcaatttcttacacatttcctcaatcctttcacttctacctcactataaagatatatacgtaaaaaattgccttttgcactaaaaatccctaagtcagtattgctaccaacttagggacttcaactatccaactgaaatatacattaattgccggccttcgtaatctacggattatcctcgccagctatctcttcattcagcagaatagccagtcagcaaatcattctgttacacaagaaataattattcattaagaaaagacttaagattaagctctcataacttaatcttaagtctttttaatagtcgtcaattatagttatcaatcaaaattaacgtctgaattttgatgaattttacttgtttattgcctttgaccacacaagagtccctttctcgttggtaaatcttatcatgtctaccaggattcatagaaatcgtcttggcaccatctcttataattaccctttggggaccatttactattgcatccctttttctaacttgaactactcccacttagctaaacctacggtttaattgcttgaagtgggagattctggaaacatcgcatacttaccctaccgattctgaacgaaccttcaagcagaggttacgactattagccaaggctcgtcccgagcctaactttatctatcggatagctaatcctttttgcaagatgacttgtgcagcgttaatatcacgatctaaatgtttaccacagtttggacaatcccactcacgtaccgctaaccattccgatttattcaatcctaaccgatgattattcttcccacaattagcacaaatttggctagtatatgacggattgacctgaataagctttttaccgtaccagtcacacttatattgcaacatatctactaattttgaccagctagcgttagcgattgctctagctaaatggtgattcttcatcattcccttagtattaagtttttccaacacaatgatgtcgtactttttgaccaatttagtagtgaatttttgtagctgatccaaccgttggttggcaatcttttgtcgatacttcgccaccataatacgagctttctgataattcttaaaatcatctaattgccgtggaactaacactttattatgatgatcccaggcgatttcctgctgagcctttaagaaccgacgactacgcaatttctcccaacgatacaactttttatggtatttgtcttcaaaatgattgatcggttccttgcatccatctgaaagattaagtaatgacttaagtcctaaatcgccaccaatatatttacttgttttaggaagagtttggttttcgctttccactaaaacagtaatgtaatattgaccagcaacgttcagacgaacagtgacattcttaattttacccattggcaatcgaccagctctaaaatagacgataccgagttttggtaactttatatgatggcaatctaaaactttaatattgccattaacgtactttgaattgtagctctgagaatattttctggatttaaatcgagggaacttattttgacctttaaaaaagcgttgaaaagcatcggctaaattgcgattagcactttgcaaagcagttgattctgcttgtttcaaccaaggatactcaaccttaagttgtttcaacagattattcatcccaaaggcattcacaaatttagcttccggattattcttgcgccgttcaatttgcatattaagcatttgattccatacaaaacgaacacaaccgaaggtttgccagagctgatttcgttgtgctgaatttggatagatgcgcattttaacggcttttagaaccattattttctcccttgactttcaatatatcgttttacaacttctaaaggcgctccaccagtgctaattaagcaatagctttgtgtccaaaaggctgatttccaaagatattgcttgatttctggaaattgttttttgaccattctggagctagacgatttgtaagcatttaaaaatttagccatttccgtatgaggcgttgttctaaacaaaacatgtacgtggtcctgatcatgattccattcttgcaaattaatgccgtatgcttgtcccacaactacaaaacgatgtttaagatattcagatatttcatcgttaattacttttcgacgatacttaaccaccattaccaaatggtaattaagtaagtatactgaatgctgatttctatctaattctattgttatcaccacattttatagatatatactaaatatatcatagaacaaaagaaaaagcactaacgcgctttaagagagcgattcatcccctacttatagaagtaggggtattctcgcaaatttatggataaagcgagtaatgtttgttttgacgatataattttttggctttctttaagcttactactttaagtggtcgggctccctacgcgtctcttccgatatatgcaatactgaaatgttggcgcaataaagtgtttgtagcgttaaaaatataataataattatagagcacttttttatctttatcgaagtatctaaattctagtgcttcagtcttatttggagtcaatgaattactggcgtttttggttcctaaataagtaaataaagcaattgaaaggccaaaagcgatgagggcgatatacccccaccgcttattatttttttctgggtgtaattttgcgtgaaactagccgatgattaccttgacttagcttcgtatgacatactgaacattctcgtgaccctaatgcattaacttttccacaattaggacagactaaggcaagcatctgtcctttaagggatttcccacaattctcacagacttcggcatcgtctggatttaatgtattacagtagggacattttttcatttagtaatccccattgaagagctgtgcattgccattcgcttatcgggatagagtttcttagctagggcggttaccgctgtcggtgcttcaccaaagccggccgcaatcaatgcgactttccccgggtaggtcacaccatccccgatcgcatataccccttcaacactggtctccatcattgaatcgactttgatcaagttgcgctctgctgctaagtcaagggaccactgatttaaggccgcattgttagaagtaaagccatagttaaccacaatcttatccacattcaattgtgcttcgtcgtcactacgcatcttcttaagatcaagcgttaccgtttcatcgtcttccaccgttaatgcgcgtggtaagaaaggcgtatctagttgtacagatgactgtttaagctgagttacagtatgctccagaccgcggaactggtcccgccgatggacaaggtggacttccttagcaacgggttcaagcatcaaggcaatatcaatcgcggagtcgcccccaccaagaatggcaacccgcttgtccgcataatcagctttatgattaacaaaatatgaaagctgcttgccttcaatctcagctgctccctctaaagcaagcttacgcggagtaaacgccccgttaccaagagcaatgattactgctcgtgaccgggatacccgctttgctgatttgatggtaaaggttccatcgtcttttttaatgacgtcctcaacagtttcaccgaggaattggtcgatcggtgccactgccatttgctcttctagcttagcaattaggtcatgtccagttacacctggcattcccgctacatcccaaacttgtttttcaggatagagtgcccctacttgtccgccaagttgtggaaggctttcaattagctgggcatctaattcatgaaggccgcaataaaatgaagcaaacatccccgctggacctccaccaataattgtcacatcgtaaattttctctgccatttctcctctgatcctttcattttcatctctagaagtattatatcatctttatttttctaaaatttagtaagcggtctcaaattttaattgtaattattcaaaatttaaattaacatattatatacagagattgattttgcttaaaattggaggaataaatactatggcaaaacgtaaaatgattcttgatttagatactggtgttgatgacgctttagctattgcctatgcgctcgctgacccagaagttgatctaatcggaattgtaagttcatatggtaacaacctattagatgtttgtgccgaaaacagccttaagttattggaattattaggtcacactgatattccagtatttaagggtcttccacattcatgcactactgaacactttgatgtaatgcaagtttcaaaggatatccacggtgataacggtatcggtgatgttgaattacctgcgccaagtcgggctcttgaagaacaatccggtgttgatttctacatcgaagccgctcacaagtatggcaaggacttaatcatcatccctactggtccaatgactaacttagctgctgctttgaagaaggatcctgaaattgctgacttgattggtaatgtcacattcatgggtggtgccttaactgttgaaggtaatgttactcctgtcgcagaagctaacattaaccaagacccaaaggctgccgatgaagtaatgaagtccaatttgccacttacgatggttggtcttgatgttactcttcgtactcttcttactaagaacgaaacaaagcaatggcgtgaattaggcactgcttccggtaaggcttttgctgatattaccgacttctacatcgacgcttactacaaccttgatattgataagcgtggttgtgccctccacgatccattagctgttggtgttggtattgacccatcatttgtttcaactattagcttattcatgaaggttgtttaccaagaaggaccttactatggtcggacaatcggtgacaacgctaagttaaacgatcctaaccctaatgttaaggttgccgttaacgttgacaaagaacgttacctcaaggccttcatggaccacctaaacaagcttttcaaagaaaattaaagtaagtgggaattaacctcctcgacaaggcggtgggctaaggatagaacggtgattagcacggcacaggctgattatcgttcggacttagacttgagtcttgtggttaatttccacgatatcttaacaaatattcgcattaagaggctgttgaaaataattctccagtctcttttcattttacaaggcgttattctcctgtttttcttcgatagttgttatattgaactactcccacttagctaaacctacggtttaatgcttgaagtgggagattctggaaacatcgcatacttaccctaccgattctgaacgaaccttcaagcagaggttacgactattagccaaggctcgtcccgagcctaactttatctatcggatagctaatcctttttgcaagatgacttgtgcagcgttaatatcacgatctaaatgtttaccacagtttggacaatcccactcacgtaccgctaaccattccgatttattcaatcctaaccgatgattattcttcccacaattagcacaaatttggctagtatatgacggattgacctgaataagctttttaccgtaccagtcacacttatattgcaacatatctactaattttgaccagctagcgttagcgattgctctagctaaatggtgattcttcatcattcccttagtattaagtttttccaacacaatgatgtcgtactttttgaccaatttagtagtgaatttttgtagctgatccaaccgttggttggcaatcttttgtcgatacttcgccaccataatacgagctttctgataattcttaaaatcatctaattgtcgtggaactaacactttattatgatgatcccaggcgatttcctgctgagcctttaagaaccgacgactacgtaatttctcccaacgatacaactttttatggtatttgtcttcaaaatgattgatcggttccttgcatccatctgaaagattaagtaatgacttaagtcctaaatcgccaccaatatatttacttgttttaggaagagtttggttttcgctttccactaaaacaataatgtaatattgaccagcaacgttcagacgaacagtgacattcttaattttacccattggcaatcgaccagctctaaaatagacgataccgagttttggtaactttatatgatggcaatctaaaactttaatattgccattaacgtactttgaattgtagctctgagaatattttttggatttaaattgagggaatttattttgacctttaaaaaagcgttgaaaagcatcggctaaattgcgattagcactttgcaaagcagttgattctgcttgtttcaaccaaggatactcaaccttaagttgtttcaacagattattcatcccaaaggcattcacaaatttagcttccggattattcttgcgccgttcaatttgcatattaagcatttgattccatacaaaacgaacacaaccgaaggtttgccagagctgatttcgttgtgctgaatttggatagatgcgcattttaacggcttttagaaccattattttctcccttgactttcaatatatcgttttacaacttctaaaggcgctccaccagtgctaattaagcaatagctttgtgtccaaaaggctgatttccaaagatattgcttgatttctggaaattgttttttgaccattctggagctagacgatttgtaagcatttaaaaatttagccatttccgtatgaggcgttgctctaaacaaaacatgtacgtggtcctgatcataattccattcttgcaaattaatgccgtatgcttgtcccacaactacaaaacgatgtttaagatattcagatatttcatcgttaattacttttcgacgatacttaaccaccattaccaaatggtaattaagcaagtatactgaatgctgatttctatctaattctattgttatcaccacattttatagatatatactaaatatatcatagaacaaaagaaaaagcactaacgtgctttaagagagcgattcatcccctacttatagaagtggggtattctcgcaaatttatggataaaatttgtataagattgttttgattttactaaggaagtgtcttatcaatgggtcgtttagataataaagttgcaattgttactggtggttctaaaggaattggagctgctgtcgcaaaaaagtttattgaagaaggcgcaaaggttgtttaaccgctcggaagatggatgaaggacaaaaagtcgctgaccaattaggtgacaatgcgatctttatccaacaagacgttgctcggaaaggagactgggaccgagtaattcgtcaaactgtccaagtcttcgggaagctcaatattgtggttaacaacgcggtaattgccgaatacgccgatgttgaaaagacacctgctgaaatttgggataaaacaattgctgttaacctcaccggtacaatgtgggacactaagcttggtattgaagcaatgaagaacaacggggaaaagaatttgatcatcaatatgtcatccattgaaggactaattggggatcctgatctctttgcctacaatgcttctaagggtggtgtccgcctcttaactaaatccgctgcgcttgattgtgcccgaaaaggctatgacatccgtgtaaatacaattcatcctggttatatctcaactccactagttgataatttggttaaggatgatccaaaagcagaaggacacctagaaagccttcatccccttggccgtcttggaaagccagaagagattgctaacctcgctttataccttgcctcagatgaatcaagctttagtactggtttggaatttgtcgctgatggtggctatacggctcaataatattcataaagggagcgatcgtgacttcgtttttcgacgcgaagctagcctctgggagcccctgcaagcaacaataggcctccaacgttcggttttaccggacgttggaggccattggtgtactgcgccatttgtcttttatgaaaataacttggcttatgtcacaatccttttgtttcacattaaattccgaattaccaatgaaattgccaaaatcaatgatccaatcccgacaattatttgcataagacggccaggcaggtggcgaacaataatcggtcctaagtaacccccgattacatttccaatcatcaacggaataacataattccaataaattgtcgtctcaagggcgaacactatccaggatgttgtatttgtaacagtcatcgcaacattttttagcgcattattaactgcaaagctcttttgccgattgatcactgtcagcaaggttagcattaacactccggcacccgcattaaagaagccggaataaatcccaacaataaaaataccaatgattgataaaaattggccgatccgtgacttaccaaataatttactgtttcctgccatcgtccctgtactttgcttcggatgatggggaaacaacaagataattccggctaacgcaatgcataatggcaccagttccgcaaaccacttactggggacagcaaatagcaaaaaagccccaataatggaaccagcaaataccaatggcaaaataatccataattgtcgccgattatgctctaattccttaaacgatgaaaagaccgaactatagttaccagtgactgtcgaaaaagcactcgttacgtttgccatcactggcggtaaccccaatgcaagcagtgaaggataggagactagtgatgctaaaccagcggctgcactaataatccccgaaagaattccaattcccagtaataataaaacaaaaactactccactcatttttgaaccatccctttaaatgctagtactaattgtaaaccacttttctaagataagtaacctaattaacgatttgcattctgttataatattagctatgataatagagaataaatctggggtgccaaacggctgagataatacccattgaacctgctctggttaataccagcgaagggagattcagtgatattaacttaatgattaactccatgattttttgtcatggagtttttttgcccttatatcttaaggagttttattatgactaaacgttcattacatttgcgtgacattattttgcttgccctgattggaattatttttggtgtaatttattttgcagccagctttgtctataacgggctaactgttctactgacaccaattggttatggtccaatggctaacgatttaacaatgggaatctggtgtatggctggaccgcttgccggctttttgcttcggacaccgggagcggctttccttggtgagtttttgggagcagccgttgaaatgcttctcggcgatcagtggggagcagccaacctaatttctggagcggttcaaggtatcgggtctgagctaggttttacttttacgttctataaaatgtataactggttaaccctcctcatctcatccctcacccttacatttgttacctttggctgggattggttccgcaatggctataaccacttcagcggacaaatgctaatcattatgctcatcgcccgtttcatttcaatgtttgtcttctctggaattctggttaaattgattactaaccttctccaacgagcccacttaattaaacactaagactatgaaaaatatacaatttaatgatctttcatttaattttgatcagcaaccgattcttaaaaatatcaccgccaaattcactgttggaaagattcacttacttaccggggtttctgggagcggtaaatccaccattctcaagttaatcgctggtctcctgcctaaatatggtggtgaaatagttgctggagcagtcgatgtaccaacagatgcccatatcgggatggtattccaagatccgttaatgcagtttgctcttgatacgccacgccacgaattagaattcactctggaaaattgccaagtcccaactgacaaaattccagaacgcgttaaagaagctttacaattcggtaaagttgacgaccttgctaaccggttaatcaccacgctttccggtggacaacaacagcgcgtggctttagcagcagctacggcaatgcaaccgaacgtgcttttattagacgaaccctttgccaatattgacgaagaaaaccggcaacttatccttaaacaattagtccgcctcaacagtgactatcacacaacaattatcattactgaccatgatttgcatggttacgagcgactacatccattggtttggcaattaactaaggggcaccttgctcaactttccagtaaaaatagtagccaacttttaacagcgagcgcgactccccaaattaccactacccttcctccgtcaaccttgcccacgattatcaaatttgatgaattagcaataaaacgagagaattattccttacttttaccaaccaatttaggcattgttaaaaataaaataactttattaaccggaccaaatgggattggtaaatctacccttctaaaggcaattgcccgacttttgaaatatgaaggaaagattgactatgcggaggaaaacattcaaaaaatatcacctgggaaatattacaagcatctgggattgattttccaacatgccaacgatcaattcctaaatgtaaccgttggcgaagaactggcattaggctttaaaacttgccagaacccctattttaatcaacaacaagtcaacgaagcattagcagctcttggtctgaacggaagagaagatcaagttgtttattctttgagtggtggtcaaaagaaaaagctgcaaatccttctgatgttaatgcgcggacaagaaaccttattgcttgacgaaccatttactggtttagatccaacatctttaaagactgtcctgcaactaatcaaagcatcccaaaaagaaaaaccacaaactttgttgattgttagtcatcaattaagcggacttgatggtttcattgattatcatcttacaatgaatcatcaacgtcttaattatgttggagggagttatgaatcctagtttaaaattattacttgttattttgctttcacttgagctgacttttgtaactaagctgtggattaatctgattgtcattgtaatgtgtttgctaatccttattcatcagcgatttcactggcgacaattttgctggttggcttttgtccccctctttccggcactagctatttttattacaattgtcttcttcagtcctagtcacagtttctttgatggaactgttctttttagtcgactttacgtttatgtctgccttggaacggtctttacatttacaaccgataccttaacgcttgctcgctcattagaacaaaattgtcaccttcctagcaaatacgcttatggggtgctcgccgctcttaatctgattccgaaaatgaaacaagccgttacaactatttatacgaccggacaaatgcgggtgttaatttacattggtggtcaccaacgctctacttcaaagcgattctggttgctattcaatggtcggatcaattagcgcaagccatggaatcacgcggtttcgtagaaggacaagcacgaacagctaccgtgaatatcccgattaccagccacgattggctttcttttttaagtattatttgccttgtacagataattgtaattgcgctcccttgagttttcatgcgataataatataaaagaagggactgatatagtgaacgataataatttaacggaccggatcgttaatgctttatcctatttaagcatcttatttttaccagttatctttccactaatcgtgtggataattgcaaaaagcagtgatcgaccaactattgctaaaaacgctcgctatgcattttggagtcaaattttcccattgttatatgtaataggcgcaattttagtctttagtgtcttttcattaacccccgctaacttccacgggggcgcattgtttggaattctcctaacatttgctcttttattagcccttttgttatttatttatatatttgccatggccgtgaaaatgctgattggccgtgagtaagctaagagagtagtaagtgggaattaacctcctcgacaaggcggtgggctaaggatagaacggtgattagcacggcacgggctgattatcgttcggacttagcctcgagccttgtggttacgacgcgaagctagttccacgatatcttaacaatgttcgtataaataaagaggctgttgaaaaaaataaatttttccagcctcattttttatccaaaatatcaagtgaggtgattaatcgatggaaatgattttaggcattgttcttctattgactgctgttgttgcagctaatgttgttcatcttgtttaccctaagattccactatccatctatcaaattattgcaggaattcttttagcatccctgcctactgaggccactaactttaccatgcatccagaattattcatgatggtgatcattgctcctttaatgtttaatgacgggcagaaccaatcattccgttatctttcaagcaatattaaatcgatcctatcaatgactgttggattagcacttgtaacggttttgattactggtagttttttacattggcttcaaccaggaacgttctccttagcactcgcctttatgttggctgcgattgttacgccgactgatgcggtcgctgtaaagtcaattactactaatatgaaagtaccgaaaaacgttaatggtgctctggaatatgaatccctctttaatgatgcatcgggaattgtgcttttagatttggcgctggaaacctaccgttctggacaattttcgcttggtcatggaatctggatctttgtttatgttttctttggcggaattatcttcggagcagtgttagggagtctgttaattagtctccgtactagtttgatgcgaaaacatgttgatattggctccatcgttattccgatcaacgtaatgactcccatcgttgtttactggttagctgaagaactacacctttcaggaatcctagccgtcgttgcagcaggagttgttcatagtatcctctatgatcgaatgcggcttacatctactaaagtgcaaatgtctactaccactatttggaacatcattagcgatgcgttaaacgggttagtatttgttcttttaggggtgatgcttccgccggtacttggaaggacttcttggcaaaatctgggtgcaatcgttgccttagcctttgctatctatattattacaacccttttaagattcttatgggtccggtttaagctcgtcaacattcaatcgactaacctcaaccgtgatagtctcttaatggcgttaggaggaattcacggaacaatcactctggcattggctttctcgctgccagttctgattaacaaccatcaatttgcgttccgtaattcaatgatattgattgccgcaattgttattttgattagtattgctgttggcgcaattgggtatccaattattttaccgcctaaatctaagagttattcgaagagtgaatttcaaaaagaacttattaaaacagttcaatatgctattaatgagctacggacttcagaaaaatattccccagaaaaagccgttgttattgaccaattgagtagtcaaatgacgcaataccacgaatttaatcgtaatgtttatagtcaattaatgggtaaagctcatcaaattgaattagctaccttagaccgacttaacgaagaaggccgaatctctgacaaggaggccaaattcctcgttaattttgttacgcggtcgattttccgcgtaaataaacacagctttcttgaattatgggtcatcttatggcaccggttaaaatggcgctttattcgctaccgccatctcaaaaaaggctcccgctataatgtggggccaaaatatcaattaaccaaggaacagcgcgctgaaacagctgagatcctagaaataattaatcgtgaaatcgataaataccttcatttgattgaaactccacaaaatgcgaatgaagttgccatggtacgacggacgtacttccaacgaaaacgattcttcctccacgatatttcgatggataccgacctcattacttctttatttattgaggcatttcagcttgaacatagttatgttcaaatgcaacttgctgatgaccaattttcacaagaattagcaaacgcattaaacgaacagatctcaactgatgaattggtttatactcaatcattagactaaaaaaggaaattgctgcaaaatcttgcaaagcaatttcctttttatgtttaaagaaatgtaagtaaaaaagcaatcaatgctggtaaaaattgaattagaataatttttttggttgcagtaagtgcaccaaataatgcaacaaccatcacaaaaaccaagagcattcgccatactaatactaaggttgccccactaaataaccagtaactggcgatgatagctgctcctaaggcgccgttataaataccctggttagcaaatgaaacccgtgcttcatgctgttgcgtaaacttaagcggtaagtcaaacgccttggcttgctgtgccgggttaccaaagatttctaaggccataatacctaaatgttcgattgcaacaaacatcgtaacaataattgcaagcatctttttcctccaactatttaatatagtgatctaaaaattttgtcaaatggcgccgatactcgctaggatgggtcgcatatgacttcgcgtgcgctgctcctggcactacccataattctttacttccctctgttgcacggtaattgcgataaaccatttcagttggaacaaaattatcttttgctccatggataaatagcattggacgatgattatgatgcagcatatttaaggagctggcttcatgaatgtaaaaaccattcttcacccgattaattaaactcatcgtacttattaatggcacccgtaaaaacttcggaatcccatataaattaccggcttcataattcaattcatcattaagactcgtatatccacaatcttcgacaaatgcttttacttgtgacggaaggttaatgccactagtcatcattgttgtcgcaccacccatgctaacaccaaataagactacctgactatcttccccattatgccgaataagtttattaatccatttacgaatatcataacgctctggccatccataaccaatgtatttcccttggctttgaccatgagcacgcgcatccggcattagaacattataccccatctgatggaaaagcgcggcatattcgcccatcttctctttgtcacccataaatccatgggcaattaccacatttttagttgtcggtttagcagcagggatgtaatcagcaactagtttataatttccacttgccgatttaattgtccatttttcttttttggcatgcttaaaccacattttctgctcatacaatggatcatttcgtgaaattttagttgaattattaataaaatccttatgccccggtaccattgccaccgagaaaaaatagctactagcggcaaagattgccactgcgattacaactacaattccaatgagccatcgccaaggatgccactgtttcttttttgtctttgttttcaaaataattaaccccatgtcgtatcatttaatcaatgcgcctagtttagcacactttctgttattttgcatattcttttcattcaaaattgttatgctaatgttaaaatagataatgatatattaagggagtgaaataatgtttccagaacgcctacgagcacttcgcaaaggacaaaagataaccttaaaggagcttgctacccatctcaatgaaaaccttggccccaatgaaaagccaaacactgcttcgcaaatcggtaactgggaacgcggtattcggaccccgtcatacgttgaagcacgaaaactagccgaattctttgatgtcagtctggactatcttaccggaaaaactgatcgtgatgattttgatttagcaaaattatttttctcaagtaagaacctgtcgtttaatcaaactgtactttcaagtgatgatcgatatgaaatttttcaactaatcgatggttacttaaagggacggcataatcgccgggatacagacaccttctatggtaagcaagaacaactagatttaaaacttaaataaggagtttctgatgaatcctaaaaaattaaaacagctaaaaaagcgggtaaaaaaagctcatcaaattgttaatgagccttcatatattcaagaactaaatacttaccgtgacctattcgatgactttcctcctgtaaaatacctcattaataatgttttagaaagtgatcgactactcaaaaacggcttattgccacaacctctaccaaaattattattgccggataacattcaagataccattttcaaaaaggttaatgaacagttcccacaaggtgatccacgtggcgataaactttggaataaatatagtgaggcgttgccaaaattagataaggcgttgcgcaactatcgtgattatctcgaggaaacatacggaatgtggtcatacgtcaatgcaccttttgccaaagcactttctgattatttaggtggggcaccgacattagagattatggccggtaatggttatatttctaagggattacgcaataacaatgccacccaaaggatttatactaccgatagtcaggcatggataaaagaaaacgaaacgggcaaacaccctgtcactaagattgagaagttggacgctctagaagcaatcaaaaagtatggtgacgaggtcgaatatgtcattatgtcatgggctcccgataagggtgaaattgactgggaggtcctgaaacttcttcgttcaacattccctgaagtcaaattattagttattggcgaaaaagatggcgcaactaactctaagaaattctggcaagaagcccaattgagtcaagacgatgagttacagaaagttaatgctaacttgcactcgtttgatttgattgatgaacagatttatctagcaaaataaaaaagttgaggttaaaagagaacaaaagttttctcttaacctcaactttttatttaatcaattttagccactaattttccaactacttcatgatttttaatcgctgttaagcccttaataatttgatcaaacggaatcactttctcaatcaaaggctttacatccccattagctattaattttaacatttccgcattcattcggcccaaatcagcttgctgatttgggttgccactgagatgcgccccaccaagattaacgacatctatccctagaccgcgatcaaacattggaacattatcaagtgaaggaacgtcaacaatcgttactaagcgtccattataggctaaccgccacaaatcaagttctgcttcttttttacctaccgtatcaatgatcaaatcaatgccaagcccatcggtgagatcggctaactttttatccacatcttcagtttgatagttgatgattgtatctggagcaagctgctttacatagtcatatttactagatgaaacagttgtaaataccttacaaccatgaagtttagcaagttggatagcgatactgccaagcactaacgccgccttcaacaattttatagtcgaccggattaagcccagcagcatgcaccttaattagaacttcatgttcagccggcgtaggaactggggcttccgcaaaattcaaatcttgcaatgaacgatctgctgctttttcgactactaaggctttcattttttcgctctccttaattttataataattattataacactttgcctaggcattcttcatagccatcttattaaggtagtgccaaatttgcgaacgatatttccgtaatccgaataacatcacaagataaatgataattgctagtgaaatccaaacaggactttctgatataaaggcagcaaaaaccaatgcattcaatggtcgcgccactaaattaaaacttgttaccaggactaccccggttggaattgcaacgccatagtgggccactgctgcagtatagaccggactgagccaactggccgcatataagcctaaactaaaccacacaattcccgtcgcaattacttttaagatatttccacgagtcaccgcgacaattgattcaatcatgtacggaattgcaattaaatcaactaccggaagggtcttattgccaggaagaataaaagcaattaaaaccataatcgggattaaaatgattcctgaaattaaagtggctgattctccatagccaacgccatcatcaacagctaggaaccaccgctttttatcataacggctatttttattttcgccatgtcgttttttctgctgctcatcaatttcattcgcaatgggaataaatgcctttgcgaatacgtttgtaacaaggggaaagatcgccataacggcagctaattgaatcgcaaatttagtaatctgtccccaagcgcttattttccccagtgaagataaattacccaagatcccaattattaatcccaggataattcccattgtaattggttccccaaagacacctagttttttctgaaaatctttaggagtcattttcactttgttaaatcccagtaaattccataacggatctaaaataatcgctggaaccacttgctcgatattatgtaaggagtcgacagtggtattctcaattccataatagtctgcccaccgatctgcttgaatttccgctaagactagtgagtacaggagcataaaaaattccagccctaatgatagccaataattatgagttacataaaaagctagcgtgccccaaatcatatacccaaaattattccaaatattagaaggcagaaatactttggtaacgccaagcgcaaataaaattaattcagttagtaatccaaaaacaaaaaacgataaaccaaccgttgatccaaacgctgctaatgaccctgcttgccagccgatatcaaccactggtagtttaatccccgtattatcaaccatttggcggacaatcttagtcaccactggcgtaaattctgtgataatccaggtaaaaccagttaaaccgacaccagcatagaaagcactcatcattgctgtcttaggctgcactcgtagtaataaagcaatgataaaaattattattgggacaactacactcgcgccaaaagtttgaaaaatagcattaacttcttgaagcatgttttactccctccatcgaataaactgttacctatattttccctaagactggtctttttagcaaggcaaaaggtttatctgcgtttgctatagaaatctattcagaaatttgctacagtatgatgagtttaatctattagggagggtacattttatgaaatatcgtttacaagctattatttttgtcttcgttgcctttatgctcgggtgtaacgaatatatgattgtcggcgttttacctgatatcgctcacgaataccatgattcgcttggtaagttaggcctacttgtaactgtatttgccttggtttatgctattttcactccgattattacttcaatggcaaatcggtggcgacgacatcatgttttattagttctcatggtcatcttctttatcggcaatacgtggacagcaatggcgccaaactttatttcaatattgctttcgcggatcctaactgctagtgttgccggtgcgattatctcaatggtcctcgtaatggcgagctatgttgcgccgcgtgaaaaaagagcaagcctggtttcatgggtttttgctggatttagtatcgcttcagttatcggcattccaatcgggaccgttatcagcactacccttacttggcatgacagtttttggatgatttctggaattacgatcattgtttttggcgccttgatttggctcgtcccacgtgatacgcctcaatttaagagcacccttagtaaacagtttgtgttatttaaggattcacgaattattcttggtgttagtttcattgttgctgtttgtgcggccgactacacaatttatacctatattcgtcctttaatcactaacgaaatgggctttgataacacatggttgaattggctcctattcggaatgggaatcttctttattattggtaataaatttggtggatacttggctgaccgtggcggaattcatcgtctcagtggaatctacgcggcaatgacaatcttatttctcatctttggtcctgtcttaccattccagtggggtgccattattattgtggctgtcttatgtattgccttttcatgctatggttcttccacccaattaatgttccttgatattgccgaaaaacaatatcctcaatcacttgacttagcttcatccttaaactcaatttttgctaatattggtatttcactaggctcttttactgcctctcaggctgtcaccttcactgccatgaaaaatctcggttacgttggcgcagtctatgggcttattgcaacaatactagtcatagtcctgagtaaaaaatatacgggaatgcgcaattattaatcttaactttgagtacagatttttccatctgtgcttttttatttcccgggaaattaatatgcaactaatagtagcggggtgagcaattgttgttatctaaggattctattgaccttttgattagatccaattaaattctaaatatagattttgaaagggagctttttgctatgccgtattcttttccgcatcaactgctcaaattgcggactgaaaaacaattatcacaagctgaactagctacgcgtctattcgtttcccgccaggccgtctctaaatggtaaaatggggatgctgaaccaagtatcgataagctaattttgcttgccaaggtttttaatgtttcattagaccgccttatcttgggaacaaacgactttaatcaaccagtggtaaaacttaataatattgttaaaacttttaactcaccagttctcaacagccttgatttaactattcacaataatgaacgcattgcccttcttggtagcaatggcgctggtaaaacaactttagtaaaaataattgaaggtgctttgaaacccaacaaaggtactgttaaatggtattttagtaaaaatgattctttaaatatcatgtctcaagaaaatgttttaattccaaccctaaaagttaaagagcagattatcttgacagccgccataactaaggtcggttcaaagcaacgaatcaattatcttcttgatcaattcaaattatcatcccagcaaaatacaattattgcgaaattatcaggtcgacaaaaacgtcgcctttcgctcttgcttagtgtcctccgtcagtccaagcttctgatcctagacgagccaactgttgggatggatttagaatcaattgactatttttggcattttattgaaaaggtttcgggaagtattttagttattactcatgatttcaatcaaattgataaattcttttcccgtgttctgctccttaaagatggccaaatctctcaagacatccctgttaaggaaatccaccaacataatcagacaatcgaacaacggtatcgtcaacacaatcgttaggagttttcttatgagcattatagcaattcaactaaaacaagttttgcgcaatcgtcgtttctttctttttactattctactgccaggtatttggtatgtgtttatgattcaagttgctagtacatccctccccgccactggcaacttccagctcgctttacttttgcttgctctcctgatgggaatactcggtaattcgatcgttactttcagcaaacggatttgtagtaataaggacttctatattcttcaatcgcacattagccattattctctgtgaaactatttattttcgcaattaattacccaagtcatcatcaatttgttcatcaccatcgtaattatgattcttgctattttccttcatactatcgagttcaacttcattactatcactagtattttgttaaccaatatcatcggaatatatctaagcgtgatcgggtttgcaattgggctttcctttgacgcaccaactatcgatgccgctggaaccccaatcctatttataatcgcaacttttattattccgtggaaacacctcttaccagctaattcttttattgatttctttactaatgttcaaaagctatttccaacttattatctttacgacgaccttgaccatctatcggttagtcatcttggactactatttgtaactgcgattattactctgctaccttggcttagctttatctatcgaaaattaatcaactaaaaaaccggaatacctagtactaaacatactaagtattccggctttttcgtgtattgatattatctcaagtcaatcagcactgtccacatggccgattaactagacacctcacaatccggtgagttaatgtgtcccacttgtcaaaatgtcaatggtagctcttagggtcgctaccagacctctcgactcatcgcaaattataatttagcatatttgacctatggatgcaactcttatgctcttgcttccattatatctgcaaggtgttcggctacccattcttgagttttagtaatcaaatcagttgtctttccactttgatcggtttcatttgctaattcatcgatccgcaatcccgttttattaatatcttcactctccattactaaataaagattaacagggtactcgatctctttatccaataatttaacatctaatcgctctgcctcatccatcggtatgttgattaggttggtttctaagcgaaagctaactggatcaccttttttcattttaatgttcatcttatattgaccaaggtgtcccgtatcaagttgttcaatcataaaattaattgcagttgttaatactgttttttgctgtgattgggcagcagttttttcaacttcttctgtcacaacctgatcgctcgtcaactgtgacaaataatcagctactgacatcttcattttttcatttgctccttcattttttcaattttagcttttgtatagtctgcacgctgttttgcaccataataaacaccagcagctcccactaaaattccaacaatacttagtgcttgaataaataatccgtatgcactttctcgtggacttaccatttgaaatgcggctaaactagcgattgcaaaataaagatttactaaaatcgttgcatatccacaaaagcgcatctttaaaaacgataatccgttaacaatgattgctaaaacaataaagaggagcagccgcggccatacagatgatgatgtcagcgagtgaccatgctgaacaaacataaaagcatcaaggactaatgcaattactgctgctactgatgttacaataacaactttttcattatttttcatttattttgccaactttcttttttgctatccccgcggatgaccaatatttttacatcccttaattaacgaaaagtaagtgggaattaaccttctcgacaaggcggtgggctaaggatagaacggtgattagcacggcacgggctgattatcgttcggacttagcctcgagccttgtggttaatttccacgatatcttaaacaatgttcgtataaataaagaggctgttgaaaaaacaaagttttttctcagcctccattttactaaattaagttaaaaagctcaattatgcgagtaaatcagctacttcagcggttggaattcccgtaatatattgttgggttccttccgcttcaaggactttagcaatttcatcatggtcatacttaatcccttggagcttttctgccagttggttaatatcctgtgggccaaagaaatcgccatagaatttcacgtttttgattacgccatctttaatatcaaagcgggcatcaattgtccccatatcaaagtgtttccgccgcttaaccgtaaactctggcgacttaccatagacccaatcccagttgttatagtactgctcatagatcttatcaatttctttttgatcttcaggggtaaccatgtattgcttatccttaatctcctcaaggtcgtcaacatggaagagaccttttagcaattcatccctaaatgttggcacatcaatatcttggtacttttcatccaagtatggacgaagattcgtaacccgtgatcgaactgatttgatcccctttgaagcaatcttatcttttgccacatgaagggcatccgcgacgacacttaagtcaacatcaagcattaaagttccatgggagaacgtctttccattacgtgaatacatcgcattccccgagaatttcttaccatcaactaaaatatcattacgaccgctgacttctgcactagtagcacccatttgatgaagaacattaacaattggctgggtaaacgatttaaagtcaccgaattcttcactatcacttgggaccacaaaactaaaacagaggttccctaagtcttgataaacagcaccaccgcctgataaacgtcgggttacccggatattgtgttcctttacataatcatgattaatctcttcaagcgtattttggttccggcccacgataatacatggttcttcataataaaatagtactaaaggctctttcccaaaatccttattattcattaaatattgttctgtagctaaattcattccaatattatgagaagtcattgaaacataacgcataactagcaccctcttataaaaacatcaacataaatagactaaaaatttacttttgtcatttagtcatccatttgtagtgtacgtcttttcgtaagcgtttgcaatatattatcgacaaagcaaaaaatactttcttttttacatctttttagggcgaaaacattttataataaaggtataaactttcggaggtgtctattatgacagaaatttatccatacaaacacattctagttgctgtcgatggctcaaaaattactagtaacgtcttagaaagtgccattgattctgcactacggaatcatgctagccttgatatcttacggatcgttcaagtaacgcaactaacagatggctatagtaatgcggcccttagcaacgaagaaacatataacattgttaaaactaccaaggaacgactcgatgacttgaaaaagcgcgcggtcgatgcgggggttgaagatgttaacgttcatatccggtttggaaatccaaaacgtgttattgctcatgaatttccgtcagatcacaacaccgacttgattattctcggtgcgactggtgtatctggtcttgaacgctttgttcttggctctgttacccactatgttagtcggatggcaaaatgtgatgttcttgttgttcgcaaaaacgaccatgttaactaggtgaaaaaacggtgaaacaaattgttactggcatcgttgctcatgtcgatgctggaaaaacgactttaaccgaagcactcatgtatgaaaccggcgctattcgaaagctaggtcgcgtggataatggagatgcttttttagatcctaacacactcgaaaagcaacgtggaatcactctttttactcatcaagctgagctaacatataatgaccttgcgcttacccttctcgataccccaggacacgtcgattttgctagtcaaacagaacaagtcttaccagttcttgattatgcaattcttgtcgtttcagctactgatggcattcagggatacactcgcacattatgggatcttcttgctcgttatgatatcccgaccttcattttcattaacaaagaagatgtgattggtgctgatcctagcagtgttatcaaacaactgcaaaaagaattttcgccggcttgccttaattttgctgatccattaactgacgaagttcgtgaaacaattgccatgcaagatgataaagttttagaaaactacctcagtactggtagccttagcgatcaaacaattcagcaattgattaaacaacgtaaagtgttcccttgttataggggagcagccctaaagttaactggaatcactaatttcttaaatggacttgagaaatggacagttacgcctgcgttttctgatgagtttgcggcgcgggtattcaagatttcccatgatgacaagggtaataggcttagttgggttcgtgtattcggtggcaaaattccagctaaatcagttttactaaacgaagaaaaagtgaaccaaatccgaatatataacggggctaaatttagcccaactcaggttttaaacgcaggtcaagtcggtgctcttactggattaacttccacatcccctggacttggtcttggtaaaacaaagccactccctgcgccagtcataaaaccggtcttaaattatgccgttaaagttgctaaagaggaccttcatgcttgtctcaacgccttaaaagagcttgaagatgaagatccacaactacagatctcttggcatcctcacatccaagaaattcacgttcagattatgggagaagttcaacttcagatcctgcaacaattgcttcaagaacgttaccaattggaagttacatttgatgagggaaacgttctttatcaagaaacgattactaacaaagtcgaaggggtcggtcactttgaaccattacgtcactatgctgaggcccaccttcttttagaaccaggaaaacaaggctctggaattacaattaacagtgactgcagtcttgatattctggatcgcaattggcaacaccagatcttaactagtttacaggccaaagaacatttaggagttcttataggagctcctcttaccgatgtcagaattaccctcattggtggtcgcggccatattaaacatacagttggtggagattttcgtcaggctagttggcgagcggttcgccaaggattgatggaattgaaggaacaaaacgaatgtcaattattagagccttggtatgctttccaccttaaagtaccgaatgaccaagtaggacgcgcaattaatgatattcaacaaatgcatggtacgttcgcgcttgatgaagctaatagtcaagacctaaccctgattacgggaactgctcctgttgtgggcatgcgcgactatgtccaaagcgttcgcacctacactcacggccagggtcagctcgagcttgttgttgctggctattatccatgtcataatgctgaagatgttattaaagatgttaattatgatccggttgctgacctaaagaacactcctgattctgtcttctgtgctcatggtgctggtttccccgttccatggaatgaagtccccgcaatggcgcattatccgtatagaaaataggttgttgataaagagagaggctgagaaaaaacttcgttttttcaacagcctctttatttatacgaacattatttaagatatcgcggaactagcttcgcgtcgtaaccacaaggctcgaggctaagttcgaacgctaatcagcccgtgccgtgctaatcaccgttctatccttagcccaccgccttgtcgagaaggttaattcccactcactctcttttttcattcaattgtcaatagcaatccatacaatgcacctaataaattagcctcattgccaaactttgcggtcattatttctggcatcgtaacatcatcatgaagacggtaatcactcttctgcagaatcataaattgcttctttatttcatcaattaaaattttttgcgtactaatgccaccaccaatgagcacacgttcaaggtcaacaactgtctgaatatttaaaatcaaaacagctactcgccgacaaaacccttcaaataaggaccaaataactggattatgacaattaatttctttaaatactcgtcggccatcagttttatccttaatatcacaaatatcagccatggtttcaatcatcttaactgctgaagtagtagcccccattgtcgaatagtgaagttcaggcgcatcattatcaatgatcatggcacttaattcaccggcctgaaaatgcggtccatgcaagagctgattattaataacaatcccgccgccaacggaagttcctaatgtaattacagcaccattactgataccgttgagattgccaagccacatttctgctaatgtcgcacaattagcatcattaccaacatatactggacaatgagctcgtgattccagataggctgcaaagttaaaggtccccataaagccaagggcgccagtaaattttacctctccagtcgtcggattaacgactcctggaagactgacacaaatcgcagtaaccttttctaaaactggttcaaccacagcaaagattgcagccagaaacgcttctttttgatgaggagttgggacatggtttctctcaaaaatattaccagagtgatcaattaatgcactctttatctctgtcccaccaatatcaatactcaaatactgtcgttgcataactcctcacctcatttctcttatattatacacgactccgctgttgagggtaccaaatacaaatactgatgaataagcccaccagggtaaaaggcaaccaactaaagccaagttgatacaagggaaagtatttttctgcaaaatggattaatgacatgctaaatgtggtatcccgtaaaaccggtgggaaagtatttaccatatcaaaaaatgcaggaatcattgttatacctgtcgtgattcggtaaattaacgaagctcccttgaataggggcgaaaaaatacctagtaggatcaacacaatggctagcgggtaaagaaacattaaaactggtatcgaccatgaaacgatccggtccagtcccatgttagcaactagaaatgacaacaggcaattgccccgcaaaaaggctttataagaaatctgggggaaacgatagtggaagtcctgggcaaaagcgactactaaccccatcgccgttgtcatacacgtgattgtcgcaagggttaacaataatacatttccaaaatctcccatataataatgagcaatttggtttaatgttgttcccccattggctgcgattgtgaattgataccgactcgttgttcccaaataaattagtccaatatacaaaatcccaattcccaaaattccaatcattccacccttggtagtagcaagtgaaactgattgttgagatttaaaaccaagttggcgaattgcggtaataatcgtaacgccaaaaaccaatgctgctaatgcatcaatagtattatatccttgaataaaaccattactaaaggcatgattaacatattctggagttggttggggagtagttgtacttcccattggatgaacaaaggcgagaagaaagatcaaaaataacataataaggaaaattggatttaaaaccttaccaattatttcggtgatttttccttcacgcgttgcaaaaaagtaaacaattagaaaaaatgctccggtataggctaataatccccagccttgcatccctttacttaaatatggcgcaactccaatcgtataaggaacagttgccgtacgcggggttgcacataaaggtccaataattatttgaaccaggataaggaaaataagggcaaaccttttcccatttggtaaagctagttcatataatccatttgcatgtgtaatactaatcgcaagtaatgcaaatagcggtaaaagaacaccggaaagcaagaatccgcccgttgctgctatccactggttaccggctaattgtcctaaatgtacaggaaaaattaaatttcctgccccaaataacattccaaaaattagcgacccaattaccaagtaggttttacacgctgctttaattgagttcatagttaatcactcgctccttttctctcaatttaatctgacgctaaattataccatgaaatagtcgctggaacagaagtacattttaatcaaaaaggaccgttacatcctctcaaatgttaacgatcctttaaaactaattttttaaaaagttagctactagtttcaaaatttcttggcgtcgtgagccattaaacatatgcccttctccaggaattaaatgcaactcactgttaggcatgattacattatatttctttgatgcttcaggggaaaccacattatcagctaacccatgaattagcagtgtggggccactataatgttgcgctgtttcgtaaattggtaaaagctgcgccgttcggaagtagtcgccgccaacggtaaagccatgcatatcaaccgtttctggtatatggttaaggtcatattggcttccctgacaaacaccttttagtgcatcatcttttaaggttgcagcaggtgccagcagtactagttttgtaataatatcgctataataagccgccagcatcaaagcaactaccccaccttgcgaatgaccaattaggtaaatcttctttgcttgcatagttgtgtgagcatagtcaatgattttcattccatccagaatttcactaaaaactgtcatatccttgaattcaccatcactatgaccagtcccatcaaagtcaaagcgtaacgttgaaattccttgttgatttaaatagtgcgaaagagcatacagaattttagaatcatcatatcccagattgcccttaaagccatgcatcagaattgcgactgtatcgtttttaatcgtcgttgttccctcaagaagaccatatagagatcatctcgtttgattgttatttccatcaaaccacctcccacttattatacactgtttgatttaatgttttagcttctccaacattgcacggtggtgtgcctcgtgtttctcatccaccttgataaagaagtaagaaaccgcagccaatacggcaactacaacaccaactgtaatcgtcttaattgtaaaattggttctcatatagcatgagattaagagtactaacaccggaatgatatattttccgagaagcttaaacccgtgattagggaattcattagtatgtttaaacttaattactgctaaaattgatggaacatattgaacaaacgaagcaagcacaatacaagaaacaagaaagaggtaagattgagtaactaataacatcgaaacaacggctgtcaggataatcgctacccatggtgcatcatggcggttctttttaccaacccactttggtaacattgcgtgttcattcgctagtgagaaaattaatgacggagtgttaaaggaggccgcaaacgctaccccaaaaatactgatcaacattcccacaatcactaaaatgtaccccccatttaccgacaccagttccaaaagcattggcaattagtgtactatactttgacatcctagttcctaaaatacggattgctactagcatcattagcgaatacataatcgttacactaaccattacggcaattaatacgcgcggaatatttttctctggatcggtcatttgttttgcagcaattgggataaaggaaaagccagtaaacatatagaagacaacactaaaggctgctccaaaatgtttggcaagcggcattgccccggtggttgctgcatgagggattaccggtgaaaaattagcaaagtgaatacaaaaaacgccaataacaataaaagcaaggatcgtaatcatttttgcagctgaagagaggttatcgaccaacttaacaagcgtccggccgaagaagttaatgattgaaaataataaaattaagccaaaaacagaaacatagtatacccaatgagtattaaaaagtggtaaaaagcttcggagagttgtcaataaggctaccacttcggcagataaagtacagcatcctaaaagccacgtaaagatgccgagctcatagccagtaaaccggccaaatgcattatatgaataaagccaagccgcacctgatcctgtaaaacaactagaaaggtccgcataacataacgcaaccatgctaaccgtaatagcggcacagagtaagacaaggacacttgctaaatccatatctttatagataacttgtggtagcaaaaaagcacctgacccaataacaccattaatacctaaaaagtaaattgaaatgaacgataactttttaggatttttctttttcgtattgataagctccaccttctatcctttataacaaaaataatattatcttcatttaaagtctattcttattttaaaggctttacaggtaagcaagttaaccaatttttatatttctaaacaaaaagagaccgagttaaactcgatctcttttcttaatttattaagtgtttaattagcaatcagtagctgattacttaagacccttccaagtccagttagtaacttctggtaagtccttaccttctgaacggatgtagtggttgtgcttgttgatcatgttgtccatcttggcaacaaatgcagcactcttttgttcgtaaccaggaacactttggatagcgtccttagctaagtggaaccggtcaagttcgtttaatacacgcatgtcgaatggagtggtgatatcaccattttcttcgtatgagtgaatgtgaacgttacggttagcacgatcgaagaacaatgcttggatcatgtcacggaatccgtgccatgcaaagataactggcttgtcagtagtgaagtaacggttgaattctgcgtcagacaaaccttctgggttcttgtcttgcttcatcaacttcatgatttcaatgatgttgatgtaacgaatcttcaattcagggaagttgtcatgaagaatgtcaatagctgcaagagcttcttcagtaggttcagtaccagctgaagcaaatacaacatctggttcgctaccttggtcagtagatgcccagttgatgtagccaagaccattgtcaactaattcagtagcttcatcaatggagaaccattgtgcacgtgggtgttttgaagttacaaagaggttgatacattcttggttacggaatgccttgtttgatacagccataagtgagttagtatcagcaggtaagtattccttaacaaggtctggacgttccttttcaaataagtgagtcaatagacctggatcttggtgagtgtaaccgttgtggtcttgttggaatacagttgaagtatcaacaaagttcaatgctgggtattgacgacgccagtaaagatccttagccttacgtaaccacttcatgtgttgagtaagcattgaatcaacaacacgaccgaatgcttcataagttgcgaagaatccgtgacgaccagttaatgtgtaaccttcaaggaatccttcagcttggtgttctgataattgagaatcaatcatccgaccttgtggagcaacgttttcatcgtttggttcgtgaatgccttccatccattgacgcttttggttgtcaaggaatgcgtaaagacggtttgacttagattcgtcaggaccaaatccacggaagttagttgggttcaattcagccatcttgctgaggtacttaccccattcaagcatatcttgctttacaacagaacctggagtttgaacgtcaacagcaaagtcacggtagtttggtaatacaagtggcttaggatcgataccaccattagtgataggattcatagccatacgacggttaccttctggtgtgttctcttcaacaagagcaactgggtgaccgttttcgtcaaacaattcttctggcttgtatgacttcatccagtcaataagcatgtccttgtgttccatgtcatcttgtgataccggaataggaatttggtgagcacggaatgagttttcgattgggttaccatcaagatccttagtaggaccagtccaacccttaggtgcacggaagatgattaatggccattgtggtaatgaatcatcgttgttttcacgagcgttcttttggatagccttgatttcttcaacagccttatccatagtcttagccatttgttcgtgaacttccatgtgtggcttgtaaccatcgaattcaccatcacggtcagcttctttgtaagctgatacgaagtatggcttccagcccataccttcaaagtacttagtaagttcttcgtcactcatccgtgaaagaatagtagggttagaaatcttgaatccgttaacttggatgattggtaataccgcaccatccttgattgggttgatgaacttgtctgagaaccatgatgccattaatggaccagtttcagcttcaccatcaccaatttcaacagcggcgataacatcagggttatctaagatagcacctacaccgtgtgaaagtgagtaaccaagttccccaccttcgtggattgaacctggagtttcaggtgcggcgtgagatgcagtaccgcctgggaatgagaagtgcttgaataacttagccattcccttagtgtcttgtgtgtattcaggataaatttcagtgtatgaaccatccaagtatgagttgttaaccataacttggccaccgtgacctgaaccttcaatgtagaacatatcaaggtcatacttcttaattacacggtttaagtgtgcgtaaatgaagttttgaggaacaatagtaccccagtgaccaattggcttaggcttaacgtcttcagcctttaatggttggcgtaataatggatcacccattaagaacaaagtaccaactgaaaggtagttagctgcacgccagtaagcatcaacactttccaaatacttcttggaatcgtaatctactgccattctaataaacactccttctatataaatcaatacgtcctgtgctctataacaacataacgtaaatcattaaatttacaatgttaatgataaacttttttttcaaaaagtcaacctttttacaaattgatacggtccaattataaaaaattaatctttttaaggtgttctttaacatttttctatttatcttaatccgcagaaatgctaatttacctttgtttaaccccgttcaataccaacagtgtacaattaaaatttcttttgaaaaaaataaattttacatctattttaatactttaaatactgctatcatattcactagttttcttggtctaggctaacaaaagtactatatttcatgtatttatagtgaattcgcatattagaaacttcaaacggcgtcccatcatccaaaaagaaaatcccttcaattgttccaaccggctctgtttcattcaacttcaataagtcttgatcttcatttgttgacggcgaaacaccaatcgtcataaatgactttgtaacccttttccccatcatatcttctaaataattaaaaattgacccattaacaacttcgggagaaagagtgggcgtaattctaattggaataaaacccgtttcaatcataaacggctgatcatcaattaaccgtagccgtttaatctgataaacaaagtcgttatcattaagaaatagttcttcttgaacatctttacttgcaggaacaacttggtaatcaagtaattttattccttgctttttaccatctacttggaaactgtccgttacacccaaattactaccttcataatggaacaatgactggttttttaggtataacggattaataaatgtaccggatccgcgtttcttaaaaataattccttgctgagcgagcactcccaatgcccgttttatggaactgcggcttacctgatagatttcacttaagcttcgttcatcaggtaaacgcatcccttggtatttattgtctagtattttttgttttatatcacgcatcactgagcgatatactaagtctgccatctaattaactcctcggatttaattaattcgcaatttaagctacacttttagtatagcaggcctattttaaattgggatccttttgtaaaatattggtgcgtcccagataaacttaggaggaaatttttatgagtaaaaaaaataaaaaaagcaaaatgaaaaaaacacaggtagaacaaatcctcgataaaaataacattgcttacgagcaagctgaatttccgactcaccaagatggcgatgtacgttcaatgagtgttgatcataccggggttgacgaacatattatttataagaccctagtattaaccggtaacgtaaccggaccgctagttggcgtcatcccagtcgatacacacttagatgagaaaaaacttgctaaggtttcgggcaataaaaaggttaatatggtgccgctaaaaaatcttctcaaaactaccggatatgtgcatggtgctaacacccctgtaggaatttacgagaagtttgaataccctatttttattgataacgaggccagagaacaaggcgatattttcgtttcgtcaggtaaagtgggccgttctattaaattaaatgccgaagatcttgccaccctagttcatgctactttcgctgatttagaacaaaagtagtttcttgacgattgacccggttaatgttgaagattaaactgattattgtagtttgtttgatagaaaggtcctgaaaagatgaaaaagaatttatctgcttgtaccactgtccttgtgggtcgcaacgcaacgattgatggttcaacaatggcagcacggaatgatgatacatttggtccacttacgccccaacgcttcgttacttatcccgcatatcataatcaccctaaccaagtaaaggcatacttaaataaatgtgtaattgatcgccctgctgatggttatcgttatcaaggtactcctaatgttgattatcgaactgaaggggtattcgatgagagcggctttaacgaaaaaaatgttggaatgagtgcaaccgaaagtgtttatgcaaatgaacgcgtccttgcctgcgatccgcttaataccgaaaccggaatcaatgaagatcttgtggtcgctgctacccttccctttatcgatagcgctcgtgacggggttgcataccttggtaaactagtcgccaaatacggttctgctgaaggaaacggtattatattcagcgacaaaaaagatgtatggtatatggaaatcgtcactggtcaccactgggttgctcaacggatccccgatgactcttatgccgtaactggaaatcgagtagcaatccagcaagttgactttaatgaccctgataactttatgtggtctgacggcatccaagaattcgttgagaaaaaccacctcaaccctgataaatatggttgggacttccgccatatctttgggactgctgatatttttgatcaacactacaacacgccacgccaatggtacggtcataaggtattaaatccggaaactgaatttgatccgcttgattttgatattccatttattatgcaaacggaccatcgaattacccttgaagacgtcgaaaagatcctcagtagccactaccaaggaacaccttacgatccactaggtcatgaaggtaccgaccagcaaaagcatatgttccggccaatttcactaaaccggacgcaaaattcccacgttcttcaggtccgcaatgacttaccggaagctgcttcaacgattatgtggatgagctttggtattcctacctttaccccatatgttccattctttggtaatgctgaagacattgatgtaagctatcgtgaaacaccagagaaactcaatatggatttaaagagtgcttactggatgtatcgggcgctttcaatgattgtcgaatcacaccatgcagaattttctaaggccgacttggattatctcaaagatgcccgtgaatatctctaccgctgggtcaatgaagttgctccacaggttaaggggatgtcatcttctgaagtcagtgctttcctaagttcaaagacgcatgaaatggttgccgaaatggctaaacgaacaaaagctttaatggctgagttagtaatgaatggactcgaactttctaagttaacattccaaatcgataaaaacttgtaaaaataaagatgaggctgagaaaaaacttagggcattatcgccctctgttttttctcagcctcaactatttttatgaacaataacaagataacgtgcaaaacaaccacatttttctttaattatttccagcaaactgactattataaagattagcgtaaaaaccttttttattcattaatgattcatggttacctgtttcgataatcttcccatgattaaccacgacaatctggtcagccttccgaatcgttgacaagcggtgggcgacaacaaaactagttcgttcttgctgcagagcattcatcgcttcttgaatcaagacttctgttcgggtatcaacagaactagtagcttcatccagaattaaaatttccggatcagctaaaaatgcccgtgcaatcgttaataattgtcgctgtccctgtgaaatattagaagcagactcgtctaagaccgtttggtaaccatcaggcagttcacgaatgaaagcatccgcccgagccatcttagcagcatgatagacttcttcgtccgatgtattctcgttaccatacttaatattttcaaaaatcgtcccagtaaagagccaagtatcttgaagaacaatcgcaatatgcttacgtaaggtatcacgagtcattgaacgagtatctttcccatcaagataaatatggccgccttgcggatcataaaaacgctctaaaagattaataatggtcgtttttcctgctccggttgggccaacaatggcgaccatcttatctcgtggtgctttaaggttaaagtcttgaataagcggttcatcagtatagctaaacttaatatccttaaattcaactttcggaatatcctttccagtaagggatggaatattctcaaccttatcactcatctctggttcatctaaaacagcaaaaatacgttctgccgaagcaattgtttgttggatggtgttacttaaattcgcaatttgggcaattggttgagaaaactgattggtatattgtagaaatgcttgcacattaccaagagtaatctgaccatgaataacttgaatcgctccaaccactactacaacaaggtacccaagattccgaataaagaccatcattggcatcattaagctagagaaaaattgtgctttccatgctgcttggtagtactgatggttctctttattaaacttttcttcttcatcttgttccttgttaaatgtccgcacaatcgtatgagcagcgtacgtttcttctacttggtcattaatttttcccaaagcggcttgctgacgaccaaatagacgttgtgaagttgaggcaacaaaagcaactaccagaatactaagcggaattgtgacaagggcaatgattgttaatttccaactaatcgtaagcattaaaatgaaaacaccaacaagcgttaacaaactcgtaatgatttgaatcaaactttgctggagggttcccgcaatattatccatatcattaaccattcggctcataatatcgccattattatgggtatcataatatttaattggcacccggcgcattttctcttcaaaatcttgacgcaaattgtaaacaacacgttgcgatactcgtgtcataatttgtaattggaggaaactaaatagtccagagaacaaataaagcaaaatgactgtaattccaatttgccaaatccgggtaaagttaattggaagggtacttaagtgggcaccagctttcatttctgcataccctttaagcattccatcataaatgatcgtagtagcttcaccaagaatttttggtgctaagattgacaaaataacagaaataacagctaagagaattgaaacaataaccccaactcgccatggtcgtaaataggcaattaatcgctttgtggttggccaaaagtgttgagcctgttcaggtacttgtggtcctctacgcacgatcaacatcccctttctcgacttgtgacttaattatttgttggtaagtttcattatgtgcttttaattcttggtgagttccttgaccaactacccgtccttcttcaagcacaataatttgatcagcatcaacaacagtagagattcgctgggccacgataaccgttacagcacgttgaatttgtgggtcttttgctaaagcagcccggagttttgcatcagtttcaaaatccaaggccgaaaatgagtcatcaaaaacataaatcgatgcgggcttaataattgttcgagcaatcgctaaccgttggcgttgaccaccagaaaagttactcccgttttgctcaacaactgcgtccaatccgccttcttcacggacaaaatctgctgcttgcgcaatttcaagtgcatgccacatttctttattcgttgcttcctcatacccaaattgaaggttagaccgaatagtcccactaaaaagaactgcttgctgttgagtaatagaaataacctcatgcagattatgctgacttaactttttaactgggacaccatcaactttaatctccccgctttcaatatcaaataaccgcggaattaagttaaccaaagctgatttacctgaaccagtccctccaataatcgctaaagtctgacccgctgtaactttaaagtttaagtcatgcaaagctagtctttctgccccatggaaacgaaaatcaacatttttaaattcaagggaagctggttgattaatcgaaatcttttcttgatccttttccggtgcattatgaatactgattggctggtccaagacagcattaacacgggtagcagatgccgatgctcggggaacaaagacaaagatcattgaaagcatcataaagctaatcataatctgagtggcatatgtcataaaggcaattaaatcccctacttgcatgctcatattagctacaagatgaccacccagtagaataatggcaacatttgtcattcctaaaataagcgttaccactgggaatagtgtcgaaacaattgtaaaggccttgattccggtttgcgtgtagtcctcgtttgcttttttgaagcgattttgttcccaatcttcctgccgaaaagcacgaataactcgaactcctgttagcccttcccgaaagattaagttaatgcgatcagtttttttctgaatgctcttgaataacggaaccgcaaagtacataactgccatgacgataatcgctaaaactggcaaactaataaaaaacactttagttagttgcggttctcgaacatacgctaaaacacaggctgcaacaagcattacgggtgattgaagcatcatccgaagcatttgcaccatgacattttgaatctgcacaatatcattggttgaccgcgtaattaaagatgaatcgccaaactcatccatttcgcgattcgagaaacgtaaaaccttatgatagatctggcttcgtagcttttcacccaccttcattgattgggtcgccgcaaaataaacatttaatccggcggccactaatccaatcgcagccacaattatcattttaattccttcattccaaattacgcccatatctttttgcacaattccccgattaacaagatcggcggtaactgtcggcaaatataggtcacacgaaacttggattaataaaaagaaaactgcaccaattgttgcccaaaaggctaaattttttcgtgctatccgtatcattgctattcctcttcactttatcgtcaaattttataattgtttggtatctaacttttatatattactctatttaattaaaattgcaattaacctaaatttcaagaataagttagccactggactcaaataaataatactgaccaattgattattggttgatggagctgtgatatctcttggtagaaggccttacgatagatatccattgacgaatgtccattaaacatagctcgtggatagtgattcatccaatcattagtcgctatgatctgagcactactatagttatttatagcttcacctttggtaatctccttgcggagaaaccggttattgatctcattggatccacgttcccaaggggaatacggatcagcatagaaaacatgatcgtgaacttgtgttaactcactaaattctgaaccgttgtcagaggttattgtcttaaagatgcgatagtaagcatctgtgcccattttctggcgtaaatttataaagaactgatttactgcatgcgcagttttaccagcaattttactcgtgatattaactcgtgaaaggcgatcagtcattactagtacaacactgtcattaccgtttttctgtccctgaactgtatctagttcccaatggccaatttcagaccgttggtccgcagtttgaggtcgttgagcaatattaggccctaagcaccttttagcttgcggatgagttcgatgatgcttacgtttaggtttttcaaagaggtctaaattggacgtacgaagcacaccctcattaatctattgatataaagttacaaccgactttgggatcagggtgccatcattcattaaatctcgagccttataaataaccgcttgtggggagtaatggtggtcgtcaaactcaccaagcattagctgatcagctaatcgtaaaaattgctttgaagaataatataagcgacgacgaccagaatggcggtgatgttcaagatatgtggcctgaccagcttcataactatagatgtagtaagaatattcgtaaatcttaccattagatttttgacgacgaagttggcggaccgtaccacggttgagctcgttattaattgtttgatgattaactcctaattggcgaccaattgcgcgattggaaagtccttgcgactttaaagtcgcaatcatcacacgttcttctttagtaagatgagcattctttttatgagtagtcaataaactagtagacatggtatcatttaagtgcgtcatttgacggacatcctttcatataggtttggttcacttaatatgatacctgatgtcacgccgaatggcgttttttatttaccaccaactgggtggctaacttcattctataatccaccaaattgcaattaaaagctttatcacatgctttatttaaaaataataaatttttgttttaaccatattaaaataaaaattttaggctaaaatataagaaggaacatgaagtaaaaagctccagtctgtttatttttaagaaacgaggtttgatattatggctgaaacagatgttaacccagaattagttaaaaaaatcgttaaacaagtattggctcaatctgctaatggaggagatagcaccaaaaaaatttttgcttttagtatccgaaaagatgaagaaccttacgttaaagaatgggctaagaaccatcccgaaatagaagtagaatatacggatgaactcttaactcctgaaactgctgcaaaagctaaaggagctgacggggtagttgtttaccaacaactcgattacacgccagaaacgctacaagcactggctgacgaaggcattacaaagatgtcgctacgtaatgttggtgttgataacattgatatggctaaggcaaaagaacttggctttgaaattaccaatgttcctgtttactcaccaaacgcaattgccgaacatgctgctattcaaacagctcgaattcttcgccaaaccaaggtcttagatgaaaagattgctaatggcgatttacgctgggccccaacaattggtcgagaagtgcgtgaccaaactgttggtgttatcggaactggtcatattgggcgtgtttatatgcaaattatggaaggcttcggtgctaaggtaattgcatatgacccatttgaaaatccagaattaaagaagcaaggatattacgttgacagccttgatgatctatatgctcaagctgatgtgatttctcttcatgtcccggctactaaagaaaacttccatatgattgataaagatgcaatcgctaaaatgaaagataatgttgtaattgttaattgttcacgaggcgcattagttgatactgatgctgtgattgaaggacttgatagtggaaagatctttggctttatcatggatacctacgaagatgaagttggtatctttaacgaagattggcgtggcaaggacttccctgacaagcggcttaaaggtctaattgatcgttcaaatgttcttgttactccacatacagccttctatactactcatgctgtccgcaacatggttcttaatgcctttgacaataaccttaaattaattaatggtgaagaagctgacacaccggttaaagttggctaataattattaatctttcttaaaaagcccgactattagtgcaagactaataatcgagctttttttgttcactaaactagtgccgtttgtaaagcacacgcaagaaggcccccaacaattgggccacacattggaacccatgcataccaccattctgaaacacccttattaggaattggcaaaatagtatatgctaaccgtggtgaccaatcacgagctgggtttaaggcaaagccagtagttgtcccgagacatgtaccaacaactgcaataaccattcctacgataaatggcttcaatccctgtgtaaagttaccaagatttaataagatgaaaataaatgcaaaggtcgcaatcacttctgagaaaaagttaaaaattggactatttatcgctggacgagtagcaaaaataccaacattatttccttcttcttcatttggggttgctttaaattgtggatagaattgaataattactaatactgcaccaacaaacgcaccaagaaattgaccaagtaagtaaggtataacgttactccatgggaataagccaaaaatagcaaaaggaattgttacagcaggatttaagtgccctaatgagcccagaaatcctgcaacataaactcccatcgtaactgctaagccccatgaaatacagataaaccaccagccactttgtttcccataagttttatttaaactattaccagcacaacatcctgctcctaataagatcaaaaccatggtgccaaaaaattcgccaataaatccatgcatgtctaaacaccaacctttttaatttttcttcaaaataaaacctaacatcaagagaataatcaccaagaaaatcccacagtaaatatatctttgcggatgtccttttacgtgtccgtaccgataatcattattataacgttgcatggctcctattattaatccactgattccatttattgttggactaagcgcaaaggacgccgacacttcgcttatttcattattaataaagctaaaaataataaaaaggactccaatcatcaccgttgaaattatcgttgcaagattaattccaactaacatttcatagataatactgttattagctggaaccttaacaagtattcttggcatctcttgccaacttcttgcaataaagaagatgagtaaaaagcaattaccaataataaacggtaaagtccaaccattatgtaattctaaacttggcggaattacaatccctgcagcgcatagaactactattggccaatacatcgaagcaaattttcgacgtgattgcggtcgttccaggagagcaaaaaattgtcccaaaagagcttgtaagaaatttaaaacgataaatatcatgacccatatatttaagtagctaggaattaatactactttaggctgtccccaggccaatacaatcgaaataattaaaacaatagctaacaacaaagcccttggtgcataaggggacagatttcgatatttttctgctcgttgataaattaatatcaggttatacatattcatcactaaaatgacagctgaaaccagtaaagtagagtcctgcaactgatttggggatgggggttctccacctaaaataatatatgctgacattgtacaaagccatcccactgtccacatcaatggaatagttggtgtcaagattaatggctgacgcggcaaccattgttccatgtgaaacacctcctcaatatggtatcttaccataagaaattgctcaaaatctggtaagataaatagtagttagttttaggaggtaaatttttatgtttttaccacaattaggattaaaaggaagcagtcaactagaccaaattgaggatcgcttacagtataatcctactatttatgaattttatactaatgctgatgactttactgatgaaggctaccaacgcctctatgatgctattcaatacgttaaagatgctggaattaaaaatattattctacatcacccaatgaagtttcaggatcatcattcagaagtagtggcccctgaaaaacagtatcctgacctatatcgctttatcgaatttacaactgaaaagctcctttatttagctgatgatcttgatgttcaagttttggttcatggtggttatgctggtcctgagtcacgttactttgtttcactctaccctagtgtagaagacgcccgaaatgctgtttatcagcggttggatcgttttgcagatgctggtggagagcatatcatgtttgaaaactcaattgcgccagtttttgcttatggcgatccccttcaagaagatgaaattcttgcacatgattatcgacttgcctttgatacatcccattgttttattgaacttcatgggaataatcagaaattggccgtatccctagcgcatttaaaagatcgtaccgttcattaccacctagttgattcaatgggcgaaactcatgatagtcttactctcggcaccggtaaaattgactgggctaacgttttgcctcacttaaatccagctgctactagtatttatgaaattaacttacacgatcaaaataattgtcgtgaacaaattgacagtcataattatttagttaaactttaccaaaagcttaataatagaggagtttaatcgtgaagcaatatattaatcaccgtcatatttctttagtattagccctatttatcctctacttagcaatcacttactgggaagttgttgctaaatttatccaaacaattttttcggcaaccatgcctcttttaataggaggaatagtcgcctatatcgttaacctattattaagacagtatgaatacctttactcgcatttatttaagaagccaagtttgcaaaaattcaagcggccagttggaataataatgtcctacttaacaatcctcctaataatcaccatcgtctttgctctggtaattcccgaacttattacgtgtgtaaaactacttattgcaaatcatagtcacattatcaaccattttattgattactttgaacatagcagtgattttaagggcttcatcaatagctttgataccagtaaaattcaatgggataaaattggtaaataccttacatctggtgttggtggaactttccggacggttatttcaacagcctcgtctgtattttcagttgccacaaccgcaattattgcgtttttcttttcaatctacctcttgatttataaagagatgttgcaacgtcaatttactaaattactttcaacatactttagccgataccagacacaaataattaaagttctgaaagtttttgatgaaagttacagtaactatattgttgggcaatgtaaagatgccgctattcttggaatctcgtgttttattgggatgacgatcttacgaatgccatatgcttcaatgatcggagttgtaactgcatttggtgcattaattccaatcattggggcaatccttggagcgagtgtcggagtaattatcattttcgccgtttctccacttcaagccggtattttcttgatctttattattcttcttcaacagttagataaccgcattacctatccactagttgttggaagatcaattggtctcccaagtgtatgggtatttgctgcagttattattggtggaggaatttccggaattcttggaatgatgttcactgttcctttatttgcagccctttataaattgttaagtgctgatgcaagaaacagaataacaattcaaaaaatgagtgaaaaaccgtagcatttttcactcatttttttataagttatctggaacatcagcagcaggttggtccttagttagtcgataaacttgcgatgtatttacaccaaagtactggttaattaacttactcaattcttccatcgcttcattagcgcgttcaatttgttctggattaattgcttccataaccgcaactacattttgagaatcttctgtcaacattgttcgttgagcttcacgccaatttagacaacgacaaacagcaccttcatcgtcataataaataacttcccccgccaaagcaggttcatcttcttcagcaccgactggccgaaatgcttcgccaccttttgcaacaccaagatgaaggttgccagcaatcttatttcgatcttcaatgcccactggaacaccgtagcttaaagaaatactattgtagacatccacaagaggttcaattggttcaaatttccgtccttgattggcacgcttcaataaggcctcaattgatgagcgcgcacctttctttttcttaaattgttgaaatgcttgacgccattgatcaacaactggattcaaacgaaaagtctcattggttagaaacttatcagcctcatgagtagcatttgctaatagtttctttcgttcatcatagttgtcatcagtatcatggttatcaatgccatttgcaaacaagatatttacctgtgcatctggaaaaagttcccaaaaacttggatcaatcgtcacttgcttcataaaaataatctcctctttataaattaatattgacgtttgcccccatgctttacggtatcccaatcgccatcaatattttggcggatacgaactagatagtcatgaacctgctgagcctctttttccgagaagcctttcaatgcctcactatttgaaaattggttttcacgaataataaaaggataaatctcttttcctttttgagtaacataaagtcgtttaattttcttattcgttggatcactttttctttcaataaagccatttttttcaagcttttttacagcacgggcaatcgttgttcggtctacttttatcaagtttgataattgttctgaaataattcctggatgctcataaatacgaacaacatacaggtattgaccacgtgctaagtcgatttgcttgaactcaatattggcaatcgaatcgagtgctcgatcaatcatccctatttcacgtaaaatatcaatcattgataaaaattctccttaactacaatattaagttctttttgttgtaattgcaacaaaataattagctttaattattttccaacggcgcaggctgagcgactttttgcatggctgttaataattgagctgcatccattcgcgataaaactgatttcagtgctaatgtcattaagcgatcattttgtgtattaatcacattattacttggaatttcttctccagctaaaagtgcattcaaaatttcaacaaagcggtcataggcagcttgcgggtaagaattcatagtaacctgagcaattcctgcacgaatatcatccagtgaaaaattcgattttaacaatccaataagcaaaagatctactaattggttaacggcatactttttcttaatcggtgcttgaataactttctttttcacataattatttaccattgattttgtaagtggctcaattcctaaatgatttaattgttcatttacaatcgccaccacctggtcaacatataaacctagtgtaggtaattctttccatcgtggaaaccgcacccgtgctaaattattttgccatcgttgatattcttctaatttatccatatcacaacctgctttcttatggtgcaattccaatcgattgattccgaaaatcatcggtagtaactgcctgttcaattatctgtgctacttgtcctaatccaatctctttaccttctaaaggattgccttcactaacaaccttaagtgaagtttcttcattagtaattggcaaagctctaataatagtatagggcaactcaaattcatcaatcattttaaccgcatattgatgagcaaggacagtctgagttgcctgttgcccataccattcctgtagttgctgatttgtcgcatcatctgctgttcctgcaatcgaaagcattactatttttgacggtaaaaacagtgagtgatcaatcaattcggctaactcttggacttcatcatctacatactcattaacagtgggaagccaacataatatatccccacgctgaatttcaaatttaaaactagtaagagcaactgcttctggaacccttttgataatagttggtactaaatcgtcatgccggtgactaataaaaactatccgacccatcacaacctccaaatctattagtaagccatcaattcatcttcaatcgttgcatcttcaattctgacatcagtaatggtgctttgctctagtaatggcagtaatgtttgaatatttccagtgaaaaggaaacgggtctcattacctgcttcttccaacatgtgtgcccctaactttactgcattgtcgattgggaaaccagttcccattactgtcacagtacaatctactccatcattcatcgacaaatcacgtgcagaagtcaaatgactgccattaaagtaataaagagtatgagcaaaccgcatcaatgttgaaatatttttgcttgtgaaaagcactaaggcatcgaccttttgagcatagtctttaacaaggtgaccaatcatttgccgtttattttcctctaagccatcaaaggcatcattcaaaattacgattggacattgccaagcaaggagaagtgctatccgcagttctagtcgttgtgcctcgtttaatgaagcaatcatttgatcaggttcaaatttcaatgatttaagcatttggagtgcttgttttgacttcaaagcatttttacgatgacgtaatgcgtggtcaacagcttttgccactgtctttccttttaaaaccacatcatcaattcggccgatttcatttttgctttggcgcttatattttttgaatggaaccccgttaattgttacatccccatttaagatttttccacgaacagataataaatcttctaatgcagttgctgcgcctgtatcgttactgcaaattccgactacttgtggtgactttagttctaatgaaacgttatctaattgatctcctgatttagcatcatagactaaatcattaattgtaatactgctcactatataacctcttttcttaagctatctacctttactaatcttatcattttttaggtaatgaacgaaataaacatgtctttctttttaatatgctttaatttataacgacttatttgaatggtaaaataatatacataaattgtacttatcaatcgaaatgaggaatgttattttgaatgagggccaactattcactaattttgtaattataatcattacatttatctttgcggcattttttgtggcagccgaatttgctttagtgcaagcacgggtaacagccctagaagaaatgcaagcaaagcgcgataaaccatctaccaaaataaaccgcgcaatcaaaatggtcaccaatctaacagaatacctttcgaccactcaagtaggagtttcaatttgtggaattattctcggttgggtcggtgaaggaacgattgaagcactcttagctgatgcactttcgttaccaagctggtcactaaacaatagtgtcatccatgttgtaagtgccattgtgggagttcttcttctaacatatttcgaagtagttttaacagagattgtacccaaaaacatcagtattgatattccaattaagaccctgatgttcgttaccaccccactgcactattttcacattactttttatcctttcgtttggttgcttaatagttctgccaacggaattgttaaaatgttaggcatgaagccagctgacgagagccaagacgtcctttcgcaaagtgagattattagcctatctcgaaacgctgttaaaggcggtgaacttgagcacaatgacttgctatatatggaacgagcctttgactttaacgataaggttgctaaagatattatgatcgatcgtactcaattaacagttattgatataaataaaaccgtaaatgacgcgattaaactatatcttaagacgaaatatagccgcttaccggtagttgctgataatgataaggataagattttaggttatgtttttaactacgacctaattcggcaaaagcaaatcaacggagatgtatctttagcaaaagttcttcgccatatgcctactactcctgagactacctcaattaccgaagtccttaagttaatgattagtactcgggtgcccatggtagtcgttgttgatgagtatgggggtactagcggaattattactgacaaggacatttatgaagaactatttggaacagtaagagacgagatcgacaaggtttcagataacatgatttctaaaattgatgaaaatcaataccggattgatggaaaaacgaccatttatgattttgaacgcttcttccatgttgaacttaaagattctgaagatagcgatgtagtaactttatcaggatatgtgttagataattatcataatattcatgaaggagaaacgatcaaactagccaaccttgagttaaaaattcaagattatcgtcattcatatattgatagttttattgttaccactttatcaaagtaaaattttacattttggcagcaataagaaaattatccttttatttaacacttaattctactaaaataattttgtaatattaaagtaaatctaaactagaaggaagaaattcacatggcaccaatgaatattatttatatctcgcttgagggaaatacccgttccttcttaacgcggatgcagggatatgctaaacaacagcacagtattagtgaagattgtccacttattgaattaaaagaagttagcgatcaaacgcttcctgccgatgaaacagaacccttctttgccttcgtacccacatatttaaatggtggtaacggaatcgattctggtttcactgaaattatgacaaatgcattaggtgaatatatttcctacaacgataacgctaaaaaatgtgtcggctttgtaggtagtggtaataagaattttaacgaacaatattgcttaactgctcgtaaatacgcgcgagactttgacgcaccatttctcgcagactatgaattacgaggcacttcacaagatattgagcgaatttatactatcttagctaaacggtggagcgaagttaacgcctaacttctaaaataaaagcgacttggaaatccaagtcgcttttatttttagccttgtttattagcacttatcagccatgttatcccatacttatctacaatctgccccattacattatttaggatccaatcaccaaatggtaccgtcacacgttgattgtctgattttgctaaacgattaaacaaatcacgtgctttatcttcctcttcttcaaaatcgagtaaaattgaaattagtgtagacgtttggggattgcccatcgttgcatctgcacaaataatcttttgtccagcaatcataaattcaccacgcattgttgtctggttcaattgatcaactggtaatccaagactttccgcctgctcttttgtcagagactcgtgatatgtaatctgagcgccaaagtcttgttcataataagccattgcttccttcgcattctcaaatgttaggtatgggtatatagccgtcatagtgttcctccaaaaatattcattgttgattatatattttgaatcgctttccgtcaaactagcttccaattggattagctacttctaaccgtatattaatcataactaaggccccattatgatataattgtctagtctattatcaagctaattttaagatggaaggatgaattttttgaaaaaactcaaaaagcatagtccgcttctaatccttggattattcttccttgggatctgtatgcggatgccgattacagcaataccgtctgtcattaaagatattgcacaaacttttaatgtagaaactactagcttaggaattttaaccactattcccctcctttgttttggattattatcatcagtagtttcagcactcgctcaaaaaattggtaatgaactaacgattgaattagcaatgattttaatgtttattggttcttacctacgaattttaaatttctcctcgttaatgatcggaacaatattagtcggggctgccatcacttgtattaacgtcttattacctgcgattatttctgacaaacttcctaatcaaattggaagtgtgaccgggatgtataatgtcgcgatgactttatttgctgcaattggtgcttacgcaattactccaatcacccatgctactagttggcaaaccgctgttatcattattagtattgttgctttaattgcagcaattatctgggtaccaaacttacgctataatcaacgtgccactaaagaaagcagttctactgagcgtggaactaacatgtggaaaaatgcaaatgcatggtggttactcttattcttcgggggacaatgtttcgtattctatagtatcgttgcctggttacctacaattgccatggacgctggattaagcagtgataatgcaagtttagttgctggattactacagctattatcaatgccattcgcctttgtaatcccagtgattgccactaagatgaaaaatcggcaaccaattatgctatttgcaggaatcatttctttaattggaactggaatgatgttcttccctgtaaattctcttgtttactatatatttgttgccctatttcttggtgccggtacaactactactttcgttcttgcaatgaccttgttcggactaaagactaagagttctgccgatacccgaaacctttctggaatggtccaatcagtaggatacttaatttctgcattaggtcctatcgttgttggaaacctttattcacaaacacataattggtttgcaagtttaatcgtgattgctattgcagctatcttcttcacagtctgtggtgtaatagcagaacgtaaacaatttgtttaagatatctttcaaagctgcggaatttttcccagcttttttagttagttttgttttcataagctataattttaaccgattccaaatttcttttaaaagtttttttgatctagaccattaattgataaacgcttaccaaagactaatcaacaagccatttagcggtagtggtccattttaactttctaagacatcttctcagaaaacgtttcctttgatagtgcagattgtgctttaagagtatataattgtcacggtataagaattttctgaaatttcagaaggagtgaacattttggctacagaaaataaggctgtcattacattatttggtgcgactggtgaccttgcaaagcgtaaactttatactgctttgttcaagttatatcaaaagggttacctagctgaccattttgcattactaggaacctcccgtcgtccattgactgacgaagaattccaacaaatcgttcgtgaatctattagcaatattccagaaactgaggatggccaagcagaagcattctcaaaacactttttctacaagtcacatgatgttactaaaccagaacattacgaaatccttaagcaacgccttgccgaattagatgaacaatttggcgctgaaggcaaccgtctcttctacatgtcaatggcaccacaattcttcggtactattgcattgaacttgaagaagcaaggattattaactgacaatggctttaaccgtcttgttattgaaaagccatttggtcgtgactttgaatctgctaagaagcttaacgatgaattatcacaaacatttagtgaaaatcaaattttccggattgaccactaccttggtaaggaaatggttcaaaacattcaagcattacgttttggtaacaccatgattgaatcactctggaataatcgttacattgataacatccaagtaactttaagtgaaaagcttggtgttgaagaacgtgccggttactatgaccaatctggtgcattacgtgatatggtgcaaaaccacatcatgcaaatcgttgctcaattagcaatggaacaaccagttgcatttactgatgctgatgttcgagttgaaaaaattaaggctcttcgtagtcttcgcctctacacaccatcagaagcagctgctaactttgtccgtggacaatatgatgctggagaaggaactaacgcttaccgtcatgaagatggtgttgatccagaatctggtactgaaacctttgttgctgctaagttaatgtttgataactatcgttggtctggtgtaccattctacgttcggactggtaagaagttagcagacaagtttactcgtattgatgttgtcttcaagaagccattaatcgatatctttgctaacccacgttctgaaagtgaccaatcccttaactcaaacgtattaactatttttgttgaacctaactcaggttttgcaatccaattaaatgctaagcgcgcaggtcaaggcttcacaacagaacctgttgatttacgcttcttgcaaagtgattctgataagaaggaatctccagaaccatatgaacgtcttttccatgatgcacttgaaggtgaccacacaaactttgcctcatgggctgaaattgcttatgcatggaagttcgtcgatgttatccgtaagctttgggatattgaaaagcctcaattccctaactacactcctggttccatgggtccagcagcttctgacgaactcttggctcgtgatggacgtaagtgggtttatcgtttaaatcattagttaataaaagtaatttatagcattcttgctgtaaattatttttttataataaaaattgatatttagcgtttgcactatctttaatttttgttataatcgaggttgtgaattatattacataagtattgaggagagtgactttaatgtctgatcaaaaagcacaaattggtgttgttggtttagctgttatgggtaagaaccttgcactaaacatcgaaagtcgtggcttcacggttggtgtatacaaccgtcaccgtaaccgtactgacgatatgatgcgtgaccacagcgataagaagttagtacctagctacactgttaaggaattcgtagactcactagaaaagcctcgtcggattcttatgatggttaaggccggtaagccaactgatgctcttatcgacgaattattgccattacttgacaagggtgatgttttaatcgatggtggtaacactaacttccacgatactatggctcgtaacgctaagttagacaagtctggtatcaacttcatcggaatgggtgtttccggtggtgaattaggtgcccttcacggtccttcacttatgccaggtggtcaaaaagaagcttatgacttagttgctccaatccttactaagattgctgctaaggctgaagaagatggcaagccatgtgttgcttacattggaccaaatggtgctggtcactatgttaagatggttcacaacggtatcgaatacggtgatgaagaattaatcgacgaaagttacaacatcatgcgtaacgtattaaagatgcctgttgatgacattgctaagacctttgctgaatggaacaagggtgaattaagcagttaccttgttgatattactgctgatatccttactcgtaaggatgaccttggtgacgacaagaacaagcctattgttgacatgatccttgaccgtggtgctaacaagggtactggtaagtggagttcaatgactgcccttgatggtggtgctcctcaatcagttattacagaagctgtttacgctcgttacatttcaatgatgaaggacgaacgtgtacaagcaagcaaggaattgcctgttgaaactgaagctatttcaatcgacgacaagaaggaaatgattgaaaaggtacgtcaagctctttacttcggtaagcttatgagttacgcacaaggtttcgaacaaatgcggatcgactccgaacgttacgactggaaccttaagtatggtgaattggctcaaatttggcgtgcaggatgcattattcgtgcacaattcttacaaaacattactgatgccttcactaagaacccagacttgaagaacttgcttcttgatgattacttcaaggatattgctaagaagtaccaaaaggcaactcgtgacgttgttactcttgctgttaaggctggtattcctgttccttcacttagtgctgctatcagttactacgactcataccgttcagaagtgcttcctgctaacttgcttcaagctcaacgtgattacttcggtgctcacacttacgaacgtactgaccgtcctggtaacttccactacagctggtacgaagaacaataatcaaataaattttgatttaacgactgagatctattctcggtcgttttttattttaaatttcttaacaagaaaatagaaacgtggtttgattagcatagaggtgagtataatgaataaaacatttatgagcggctattaccaaggtgtcatcgaaacagcccctactactctttcggctgctaaaacagaacagttagcaattacgatgacaatcctccatttacgtcatgctggaataaacattacatcaatccatgattttcttgtcaacgatcttcatgcaaatgaacgccttgtaaataagtatattaatttaaatgctgatgggttagaaactattcaggcccaagttatagcaatcgctttcaaccaataattattttgatattacttcctttttcgtaaaactttactaaaattgcattgactttttctatgaaaacgcttaccattattcgtgtaagatattattatatgttgttgtagaaaaggggagttaacatgaatacaaaaatcgatactgcaaaaagtaaacagcatgttgcccgttcccgttttgcctattcaatgggagccttcgggcatgatgtcttttatgctttactttcaacgtatttcattatgtatgttactggacacttattcaattctagtaacaaagcattcaacaatcacatggttctatgggttacatcaattatcgctgtattacgaattgtggagttgttagttgacccattaattggaaacgcaattgatcgtactaacacacgttggggtaaatttaagccgtgggttgtcggtggtggaatcatttcagcaattattttagccatcttattcaccccaatgggcggtttaagtctttctaatccttacctatacctattgatctttgctattttatatatcattatggatatcttctattcatttaatgatgttgccttttggtcaatgattcctgcgctatcatttgattcacatgaacgtgataaaatagctacttttgcgcgggttggttctactgttggaggaaatattgttggttttgttattatgccaatggttttattcttctcagcaaatcaaaatggcggtaccggtgatgatcgtggttggtttatttttgctgcaattgccgctgctgttgctgctattactgctgttggtgtcgggcttggtactcatgaagaaaagtcattgcttcgtgaaaacaaagaacaaactaaactaaaagacgtttataaaattcttgtcaaaaatgaccaattattcgctatagctctctcatatctattctatacaacaggaatcacattagttaacagtatggagctttactactttacttatattttaggtgattcaaaggctttctctattctaggtggattaaacactgttattggtgttatttcagttcttactttccctctctttactggtaaaattagtcggcgtaaattattttacgggtcagtttcagtacttttccttggcttattaatctttgcatttgctggtaaatcactcattttagttttagttggtgcagaattattcttcattccacaaccattagtatttttagttgttttaatgactattactgattctgttgaatatggtcaattaaaattaggacaccgtgacgaatcacttacattatcagttcgtccactgctagataagttcgctggtgctgtttctggatggattattggaccaactactattattgctggaatgactgctggtgccactgcagcaacagttactgctgcaggtgctgctaagtttaagctagtaatgttcctagcccctgctatcttgatcctcattagtgtatttatctttgcaaaaaaggttaaacttgatgaaaagatgcacgccaagatcgttgctgaacttgaaaagacttggggagatcaccttgaagatgctgacagcgacaaccctcaaacagtatctgtttctaccccacaacctggcgttactgatattacatcaccagttgccggtacacttgttaacttaaaagacgttaacgatgaaaactttgcttctgggaacatgggtaaaggattcgctataaaaccatctgatggtaaagtaattgctccatttagcggaacagtacgagcaactttctctactcgtcacgcaatcgggcttgaatctgacaatggtattatgttactgatccacgttggtattgatactgttaagcttcgtggtactggattcattagttactttgataaggatcaacactttaacaaaggtgacgaattaatggaattctgggacccggcaatcaagaaagctggccttgatgatactgtcatggtaacagttactaacagtaaagacttcgatattaaattattgaaagatgctggtgaaaaggtaactactattgatatcgtcatggaagttactaaaaagtaattaaatatcttctctgttaaaaaagaggctggaaaaataatccaacctctttaccattttaaagtataaactgccagaacgcagtagctggctggattctgaacgttgataaatcaacgtccagaacacctagccatccttgcgggggggtgggactaaactcgcaagcgagtttagtcccactcctttttaatctacatattttattctaaatcttgttaatgttacggcattaatcaacgttacagcagtcataataataaccacaggcgtaaacgctgaataaaaccaggaaattccaaaaccggcaattgttgaaacattgaactactcccacttagctaaacctacggtttaatgcttgaagtgggagattctggaaacatcgcatacttaccctaccgattctgaacgaaccttcaagcagaggttacgactattagccaaggctcgtcccgagcctaactttatctatcggatagctaatcctttttgcaagatgacttgtgcagcgttaatatcacgatctaaatgtttaccacagtttggacaatcccactcacgtaccgctaaccattccgatttattcaatcctaaccgatgattattcttcccacaattagcacaaatttggctagtatatgacggattgacctgaataagctttttaccgtaccagtcacacttatattgcaacatatctactaattttgaccagctagcgttagcgattgctctagctaaatggtgattcttcatcattcccttagtattaagtttttccaacacaatgatgtcgtactttttgaccaatttagtagtgaatttttgtagctgatccaaccgttggttggcaatcttttgtcgatacttcgccaccataatacgagctttctgataattcttaaaatcatctaattgtcgtggaactaacactttattatgatgatcccaggcgatttcctgctgagcctttaagaaccgacgactacgtaatttctcccaacgatacaactttttatggtatttgtcttcaaaatgattgatcggttccttgcatccatctgaaagattaagtaatgacttaagtcctaaatcgccaccaatatatttacttgttttaggaagagtttggttttcgctttccactaaaacaataatgtaatattgaccagcaacgttcagacgaacagtgacattcttaattttacccattggcaatcgaccagctctaaaatagacgataccgagttttggtaactttatatgatggcaatctaaaactttaatattgccattaacgtactttgaattgtagctctgagaatattttttggatttaaattgagggaatttattttgacctttaaaaaagcgttgaaaagcatcggctaaattgcgattagcactttgcaaagcagttgattctgcttgtttcaaccaaggatactcaaccttaagttgtttcaacagattattcatcccaaaggcattcacaaatttagcttccggattattcttgcgccgttcaatttgcatattaagcatttgattccatacaaaacgaacacaaccgaaggtttgccagagctgatttcgttgtgctgaatttggatagatgcgcattttaacggcttttagaaccattattttctcccttgactttcaatatatcgttttacaacttctaaaggcgctccaccagtgctaattaagcaatagctttgtgtccaaaaggctgatttccaaagatattgcttgatttctggaaattgttttttgaccattctggagctagacgatttgtaagcatttaaaaatttagccatttccgtatgaggcgttgctctaaacaaaacatgtacgtggtcctgatcataattccattcttgcaaattgatgccgtacgcttgtcccacaactacaaaacgatgtttaagatattcagatatttcatcgttaattacttttcgacgatacttaaccaccattaccaaatgataattaagtaagtatactgaatgctgatttctatctaattctattgttatcaccccattttatagatatatactaaatatatcatagaacaaaagaaaaagcactaacgtactttaagagagcgattcatcccctacttatagaagtggggtattctcgcaaatttatggataaaaatacttacaacggttttatttacttttaccttattgtaatagttagcaattgcaaggccaatataaagcaaggcaaaacccaggtacatgcaggttcccgcaaatcgcggatgtgcctctgcatcatcaatgaatttcattgccacagttattaggctaagaccaaataaaataaagtaatgaagatagatcattaaatttcctgtctcatggcgttgatgttcattaattaaatgatcaaattcaacaatgtaggtaaagaatagcgctgcaactgtggtaagtataagaatagactgaattgaaaagctggtggcagtaaagtaatcagcaataccgacaatcgtctcaccaaacatcacgataattaatgccgtaagccgttctagcaagtgcgaaaagatgataggatgatgctttgtatattttccggtaaagccaggcgcaatccaactgataataataccagcaaaagcaatcctcactctaactcggctttgataaaaaatcccaccaataaaaagcgtaacggtcctaaaaattaaaattccagcaaatgctcgtgtaatctgtttatctatcttcttttctgcctaaaagtaaactaaaacatattggatacataacgttaatgatagcaatcctgcagctatgaaaaaaattgctaaatgccagtcaaatgttgttgaaaacgaatttgacatatagagaagaattgccatatcgacgaacgaaaagataacatttgttcctgaaatctttccatgccgatttgtaaaaaccatctggaccatccaggaattaataaatacaatcacgacaattgcaaagattcctaaaaccggcaatcccacaatcccattgtgcaaatggtgaatcatttctgttgctcggaaaaccatgtaaacgaacactaaatcgtaaaataattctatcaaggaaactcgcttagtaatttcatctgccacgataacacactttcttttttataaaaaaagagttaatggtaatatttaccactaaccctcattgataatattcaatgactatttaacctgatctacatcagttcggacaactaacacatcaacaggcgcattacgctttacatatgacgtaactgaacccattacagctcgttgcatccgtgataatccactagcaccaataataatcatgtcgttgtggtgatcacgagggaagtcaaatgaaataattgtctttggattaccaagacggatatgaatgtcaagattgtcaaaaccatccttatccttggcagtcttcaacaattcatcaaggtattgctttgacttatcaactaactggtaagcaatacttccatctgacataccagcaaagttataagccattgctcgtgtatcaattacgtttaaaatatctatatgggcaccattacgctttgcaattgcgattgcacgatgcaatgcaaattctgattcctgagagccatcaactggaactaggatgttttgatattcttgatccataggtttgaacctccaaacaaacaagtaatatatttacttaaattataccatttttttaaagaataaagcgaaggaaaccagaataatactgacctcagataaaattccaaatttcctaaaatttagactatacattaatctttaattagagtaatcttaatatatccaatatacctttaatatttgaaagtgaggccgcatcttatggacaagatcgataggaagattattaaccttcttcaaaaaaacgcccgtgcttctttaaaagaactctctaaagaatgttttatttcatcaccagcaattgcggcgcgaattaataaacttgaacgaaatgggattattactggctaccatacaagtgttaacatggaaaaaatcaactttcatgttaaagcttttattcaggtgcaacttgagcctcgccaaaaacaagaattttacccttacattcaacaaattcccaatgtgattgaatgtaactgtgtaactggtgattattcagaaattatggaagttgtttttccttctaccaccgatttagataacttcatcaataatattcaacaacgttttggaaagacaagtacacaaatcgtatttagtacaagcgttgaccaccgaggagttaagctagcaccagcccaagataccgttagttcagaaaaagagtaaacataaaagcgaaggtgaggatttccccatcttcgcttttatgtttatttaattttattcagcttcaacgtcagtttctgttgatggtttttcctttccgtaattatctaaatatgcattatatttttcacggtcaagagtaccttcagattcaccgataacaagtgtggcaattgaattaccaaccacgtttacggcagttcgtcccatatcaacgaaacgatcaattccggcaatgaaagtcaaaccagccattggaaccccaattgtagaaacactagcaagcaatacaacaaaagaagctcctggaaccccagccattcctttactagtaatcatcaaaacaaccagcagagtaatttggtgagaaatactaagatgaagtccatatgcttgtgctaagaagatcgctgctaatgattgataaattgcagatccatcaagattaaaagtataaccagttggaataacaaaagctgtaatacccttgcttactcccatctcgtgcgtctttttcatcaaacgaggcaacgtaacttctgaactggcagtagtaaatgccaaaacaatctcatcaaggatagcgcgcatcgtcttccaataacgtaaatgaaaaatatgagcagtaataccgaggacaacaataataaagattaacattgtcacatacgcaatcacaataaataatcctaatggcagcagagcactaatacccatttcggcgattgtcattccaattaaaccaaagaccccaattggtgcaaacttcataacccaattagtaactttgaacataacttctgaaactgcatttaatacatcaattaaaattttagccttttccccaacagctgcaattcctaatccgaaaagaactgagaacaggataacaggcatcatgtcaccatcagacatggatttaaaaatgttcgttggaataatcgacaaaattaatggccagaatccgctactatgttctgcagattttgcagtggacatgtattgcgaaatatcagttgcatgaagtttatgaatatcaataaacgaacctggatgggtaatgttagccattacgatccctaaaattaacgcaattgtggttaaaacttcaaaataaattaatgtttttccaccaatccgtcctaactttctaatatcaccaatattagcaattcccacagtcaagcaagaaacaacaattggcattacgatcatttgaatcagccggataaagattgtccctaagctctgcataacagtgatggcacccttattttgatagaaaattaatccacaaataataccaagggccagcccaatcataatttgccagcccatactgaggcgtccgaaacgatatcgcttcactttatatcaatctcccttatgtagtcttattatactttagcacatttttagtaagattttagcaatttttaagattttatttaattaaatccgaacactttttgctctttctaggtattttattcacttcaatataataattctaatttataattcgtaattttcactaaagaaaaataagaccgctactaagtatttctctaatatgatagagtgtttagagaatatttaattgaacaggagtaatttatgaacgcttggataacggaatttattaatcagtttggttattttgcaattgccttactaattgcccttgaaaatgtctttccaccgctaccatccgaaattatccttacaatgagcggattcatgacgaccaccacctctttatcaattgttggagtaattatcgccgcgacaattggctcacttatcggggcacttattttatatgctctcggccgccagttaactgttaaccgccttgaactccttcttagtcatcgtttatttaaacttctaggctttcatcaagatgatgctaaaaaagcagtcgattggtttaataaacatgggacaggcggcattctctatggccgctgcattcccgttatccgcagtttaatctctattcctgcagggatcgcgcaaacttcattaggaaaattttgccttctcactactatcgggagcaccatctggaacacactgcttgttgttcttggcgcttgggtcggccaatcatggaataaaattgtcattatcttcaacgattacacgactgttgctattatcattatggcgatcgttggtttatactttgcttatcggtggtatcaaaaaagaattaagaaataaaatgattcagtttcaattagtaaaagcaataacgccattactatcaaaactgaatcatttttcatatgctatcgggttgtttgccgtttgatcaagtgagttccgacaactgtcttgcatgggtcattattcggattttgcagccgtttaatcatcatatcaactgcggcatgtgccatttcatcagtggcaatgtgtactgctgacatacttggataaacgtacttaacgattgccgtatcgttaaaactaatcaaggcgattcgatttggaacgttaattttggcttcttgaatcgctttaagcgcgccaactgccatcggatcatttgctacaaagattccatgcggcatacggtcaccaagcgtcgcaattgcctttttcatcgcgttatatcctgacatcgaggtgtagtcgccagcaaatataaattctggatgataaaggttttgttgacgtaagttactttcaaaatagaatcgccgcaaatcaggaacaatttgttgatccgttgtcttttcagttcctgccaacataccaatatcgttaattccttcgctaacaaattctgaaataactgaccgcactgcattttcaaagtccggtactaagcaatcgtaaccggcagccaaactatcgtaatcaacaaacacaatattagaagttactaaccgcaatgcttgaacttgcgaatcactaaattttccaatcgcgatgatgcccgtaacatcacgaggaatctcttccatattgttttggtaaacgggaacagtctgtagtccctgttgttgcgctgctcgttcgattcccatccgaattgccatgtaatacaggtcatctaattcttgtgtaagagaataccattgaacaacagctactcgttgtacttggttattacgtgctcgcttatgcttagtatagttaaactcttcggcagtggctaacactcgctgacgtgtcttttcatttacagaaagtgtcacatcattatttaaaattcgcgatacagtcgcaatagatacccctgctttatccgcgatatcatgtaatgttactgccatactgcttcagcgcccctttcttcattttaggttaaaactattttaaagcatcaacgaatcgttgccaaccttcatttccagctgtgtcatccttaaagactcccgcattttccaaaacattggcaaagacattagcaagttcttgttccataacctcatcgacattatcctcggtgatattaatccttgactgaacttcttttgcccatagaagatgactatctgcaatcttattttcagcaccaagccaaaacttcttgacttcatttaactcatccttaagccgcgctggtaaaatagcacgacccatcacttcaatcaaaccgatattttcctttttaatgtgccatagcttttcatgtggatggaagattccgagtggatattcatcattagtattattatcccgcaaaactaaatcaagaacaaacttatcgccttcccgatgcataattggggtaacagtatgatgacgaagttcaccatcaaaagccttaatatcaagactttcatcactgtattgatcccataccttaataatatgtgtgccaagatcaattagttgctcagtatcggtactagttaaacgaatatcactcattggccagttaacgattcctgcattaacagctggatattcatcaaagtacaattctttcttaatagaggctttcatcattgggaaaatatgcttaccaccttggtagtgttcatgagcaagcattgatccaccaacgattggtaaatccgcattgcttccaacgaaataagctgggaattgcttttcaatttcaactaagttaattaaagtttgccgattaatctccattggctcatgcttactatcaaggaagatacagtgttcgtggaagtaagcatatggagaatactggaatccccattgttgcccccctactgtaattcgaataatacggtggttgcttcgtgctgcctgtccaagacgtcccttgtaaccctcattttccatgcaaagagcacattgtgggtacttcttagcggtatcatgagcagccgctgcaattgctttgggatccttttctggctttgaaagattgatggtaatttcaagattgccgtacttagttggtttatcaaagacaacattcttcttgatagcagctgctttaacatagtcgttgctagtacataagttatagaaccaatcagtcgcacttgatggagattgttggtacttttcccagaatttatgattaactactgatggcgttggggtcatcaaatcataaagctgatcgtttaaaatttccttagcagtttgaccatcatcaattttcccgcgtttaacagctaaatcaacaagttgactaacaacagattcatcatctttagcttcaacatcttcatcatcaacaaagccccgaatcttgtttaagacatagatccggtcgagtggttcataagttccactagcaatcacttggtcagcaaacttttccattaacttcattttctcattcccccactaaaatactattaaagcttatgtggtccatcaacaacttcagcatcatagaaactggcatcgtaaccaatcttgtcccggtagatctttccaacattctttttgaagttttctgcttctgacttcttaacaatggcaatcgcactgccggcaaatccaccgccgaccattcgagcaccaaggcagcctggttgaccccatgcattttctgctaaggtatcaagttctttaccagtcacttcataatcatatttaagtgatacatgagaggcattgatcagacggcctaattcttcaagatcgcccttttccattgcatcaatggctttctttgtccgttcattttcactaactgcatgacgggcacgacgaatcagcgtgtcatcatcaattaagtaggtgtattgatcaaatgtatcggagtctagttcaccaagtttgttaatattaagcttcttgttaagacgtttaactgcttcttcacattcttggacccgttcgttgtatttggaaccagctaaggagtggttcttattagtactcatgataatgatttcataatcgccaagttcaagtggcaaatacttatattcaagagtgttgcagtcaagataaattgcgttattttctttacccattccgacagcaaattggtccatgattccggaattaagaccaacgaaatcattttcagtcttttggccaagtttaactaattcaatttcatcaatatcaagattaaattcatccttcaagatatttcccatcaacatttcaattgatgctgatgatgataagcctgaaccataaggaagaaaaccgtggatgtataaattaaatccgtgatcaatcttgaagccccgttgctttagataaaccagcatccccttaaagtagttaacccacttttcatctttagcactttgcggttctgtatcattaatgtcaaaagtaataatcttactgtcttcttcttttgctgaattagctgagtaaatggcgactgttgtgtcctcacgcggtccatataccccataggtcccaatactgattgcacatggaaaaacatgaccaccattataatcagtatgttccccgatcacattaatccgtcctggtgagaaaaatacatccttccccggttccttaaatacatcttggtattcagctaaaaattgttgcttatccatcagaataacctccatacatcaaacaaacattagtaaacttttactaaatataatttactactttttaaccatctcgtcaataagcgcttacaaataattcaacacacctaagaaaacggttacaaaggataagggatgatatacataatttcttctttaatgctacactagtcataaataattggaggatttaaatgaagaactaccaaccaactgatctaattaaatttgcttcacgtactggacgctggaccgttaaaaagattaataatatgcccaccttatacaccactaaccttggaagctaccttcgttttaaggtttcaaatgctaaaaaatgtcaaattactgttttgccaaatcaaaattccctatctcctagccaagtgtttgcatttcgaattgatggcggaaagtggcaacgggcacaagctagcttagaaaaatttgatattccacttgattcgatattacataccatcgaaataatggcagccggtaattccgacattgacgaagtgtggaaaggtaatgaaggctttgcaattaaaaacatttatcttgataacggcgcaattatggcagccccgcagcgtcctgtggtcaactttatcggtgattcaattacggccggttgttgggtagttggcaatcatcctgctgctgactaccgaccagaaactaactatgcgggaatttgtgcagatctgcttaatgtcgatagtgttcgaatagcctactctgctgggggagtgttaagacctgctactggcggggtcccaactgccgatgtctttttaggaaaaattgacaatcagacattatggacgcctaatcaccctgatctcaacgtgattaatttaggcgttaatgaccgtcgtttccctctaactcaatttattgccgctttcgatctttttatccagcaagttaagctaacttttcctcatgctcccttagcaatcatgattccttttagtcagacctttgcttctgcgatccgcacaattgccactaaacataactgttcgataattgaaactaaaacttggcaccatagctttactgatgggctccatcctgaccaagcgggcgctattactgaaggaaaaatgcttgcacaagctttacaacctcttttatctcaattcagtgtacaatagtagtaagagttaatacgaggaggattctcatggctaaccaacgcttacttccaataaagaatgggtacaactttcgtgatcttggaggttatcccacagcagatggtcatcaaataaaatggcatcgtcttattcggactggttcacttgctcatttagatcaaaatgatctcaccgttttagataatattcctatttcgctcgatattgacctccgtgctcccgacgaagtaaagaaagatcctgatcgagtgccttcccaagcaaaatattatcatttacctgttttcgaagccgacgaaacagacgcctcgcatagtgatgaggaaatcgccgcacagatgcaacagccaggaaacggttatcaccatatgattgatgtttatcaccgaatgaccacggctgcttcagctaagcaggcttaccagaaattatttaatctcttattgaataatgaacgcggtgccttgctatttcattgtactgctggtaaagatcggacaggaatggctgcttatctcatcctcagtgcccttggcgttgagcaaaagattattatggaagattacctgctaacgaatactgttactcaggattttcgtaatcactggctgcaagatatgcggaatcatggagccagcgaggcactagtgacaaatcgggctgcccttgcctcagtagctcctgattacttaaatacagcaatcaaaaatattatccagacttatggaaatattaatcagtatctcaacaactaccttgatattactcctaccgaaataaaagatttacgaaaattgtatttagattaggctcgattataattgtcttataaggaggaatttttatgcaaatctcagtaccattagttaatgggatgttagcagatgaatatggtaaatatgcgccagcagctgatatgctagctgaccatccaattaagtcatttccaattaaaattaccgacgcaccagcagatacaaagacatttgcactcgtctttatcgattatgactcaacccctgtctgtggcttcacttggatccactggttagccgccaacattccagcaacgttaacagatatccctgcaaatgctagtcgagaattagcggataaatttgtgcaggggaataatagcaatgccggctcgttggttaatggaaacccattgattactagtggttatgtgggtccacaacctcccgacaaaactcatgattatactttaatggtgtttgcgttagacgatactctacccttagaaaataaatactggctcaatgacttcatccacgcagccaaggatcatattctagcaaaagcacaaattgatttgccaagtcgtgcatgaggaggaacttatagaggaggaacttataatggaaacaagaattttctttaatccaggcgattcagtcgctaatattcatgactataatgaagctgttcgaaagggacaaatttttaaacaagcacgtcacaatgacgaacttgtcatcgccaaagatcctaacgataaagaatacgcaattttttacgctaaggatgccttaccagctgagcacgaaaaatcaaagccctacgaaattaaaaatcggctttaaaatagaaaatgactcgcggaaatttccacgggtcattttctatttcgataaaaagcttaacgaccaccaacaattttggctgtcgcattttcaagccgttcaattaatgaatcagcatcgttcttaaagtcatcaacaaatgagctcgattgtggttgaatgcgtcctacttcatcacccataatatccgtaacgactaggtcatccccatcccacttcacatcatcataatgaccttcaagagcttcatcaaaaaatgcttggagtatatcccgaacagcattttgaataacagtcttttcgtcaacttgctcaccacgtacctgatgttgagccagctgcattgctacttcttccatattttctggaatttcaacgctcattgtggattcctcctcttaaaaaattaatggcgacgtaatttccgccgagcctttttactaaacttgattccttgaagggacttctttttccgctttaattgtgaatcaattttgttatcgctactcttagccacttgttgcttttgttgcatttcgcgttgacgcttgagcaggcgtttacgttcatattcgccccatggattcaagaggccacgcataaagtcagcaacttcctgcttatgttcgtccatccacgcttctgctacatctgcatcatcagtatcgataccattactattgatgaatgataaaactaattgagtttcacgctcatcacgatttaatgaggcaagcatgtcttctgatggttgcatattagcaattgcctttaagcccaacttgtattgatccatgttgatgtaatcattttgcttcaagtattcaaacaaggcctgcgcgctcggtacgatgttgtgaatttgcttaattgaaatatgtggatctaatggcatcatcatgcccaatacgcgttgcaagttgctgaaagtccattgacctggatattcattgcattcttgtaccattaattccaagaactcttgcacaacatagttcaactcaacatcatctaattcaagattattgaattgggaagcagacttaatagcttgttgcacatttgctaataagtccttgaacttctcaggtgtccatgtaatttcttttttagcaggacttgcttgaaccgaggttgcttctgcttcgtcattttccgcatccccatgtaattgggcccatgtcttatgtgctttccgacactcgttcatctttgtccgttgttcttccattgcttttacaacttccgcaagattttcaactttcaaaaattcttgataagctcgcaaaactggaacaaccgcaattccaaattgattagttagtgctggatcagcgatgaattccccgaccatgaccgcttttactgcttctggtgtccaagtagtatcggtcaaatgctgatcatttgccatctggttattaaaacgcgtcaaaatatcctgtgcatgcttttgctgattagcagataactgatgatagttggacgaagtaagaaactggtcaatatgttgttcttgttcgttcattatctatatatcctccgtctccaaattgaattttcctttctatcatatcataattatatctagtaaatataacaagattgctaatatacaaggagaaactataccaatgcaacgaaaaaagatccaagaagcaatgaaaaatgtctattttcaaaaaatgactgcaaatggctatcatgaaattgaagaacaaattgcaaaattacaacagcaaagacctgcaaaaattggacaattaaaagcagcccgtgcgcttggtgacttatccgaaaatacagaatatagtactgctaagcgtgaattacgccaccttgagagcaggcttcggtacctcaataaacagcttcaatatgctgaaattgtgacccccaagaatgatcacactattgatttagggacaaccgtgataattgaatttgaggatgaccatgaacaagaaacttatcatattgtgggaaagcaggaagctgatcttgccaaacaaaaaatctcctttgattctccccttggtcaagcccttcttcacaaaacagctgggaccactgtaactgttgaagcgccgcaatcttcatataaagttaaaattgttaaaattgaattatagtattgataagtcattcgatatttcgtaatccgctaaaggaaatttttaaatttattattttcaacgatagggttaattttccgcccttcaattaatctaagcgactgattaaataaacttttgggtattgcatccctgattttgacccggtatactattaaacgttgcttttttacatccacaatatcttgtggttactagccggcagtaaccacaaaattgcacaacatatagtagagggagttagattaatgattagcgattattttaaatttcttgcccaccaattaaagggctggccacaacaaaattattacctattctttttcagtcttggctgtcaggtaatgactttagttagtgctccaataacgcgggtaactgtcattacatttattggaaccacgcttggagtactttgcgttttagcaattaatgctgctaagtcggtaaatggtttcttaggtattttatcggcattatgtttcatcattgctggttttagtgctaaaaattatttaagtattgccgaacaaatcgcctatgttattaccctcgatttaccagtattactttccgcaaattggaatgttaacatggcatcaaagatccgtaaattcaatgctcgttcatggacggttgccatcattgcaacaattattgtctatctcgtttctggttatttaatcggtcatcttactgacgatccacgaccatggattgatgcaatcagcttttctattagtctttccgctggtgttatttgcttcttgcgttttaacaatcaatatttctggtggcttgcatctggtcttgcacaactagtactctggtttgtttcttacaagcaaggatctgctactttagcaatggccgttaatagctcgatttaccttattaatgatgttctcgcctttaccatttcaccatggtacaacgaacgtgaacgtcaacgtctcagtaaagaagaagcagcctatgccaaagcaatgggcttagaataaatctaaaaacagcaaagagattgaaaattcagtcaatttgctgttttttgtttaatattgtttattgtattcataaactaattctggttcacgaccagtacgatgataagcatttaatgcatctatctgtgccatttcttgggcgttaagttcaaaattgtaaatatcagcgttttgggcaattctctcttcatgaactgacttgggaataaaagaaacaccattctggagatgccaccgcagtataatttgcgcagtagatttattatgagcagcagcaatatcttttaatactggttcattgagaactgctcctcgccctaatggactccaggcttgcgttactatttgatgttgacgattaaattctaatagtggtttttgtgttaatagcggatgcaactcaatttgatcaacaactggcatttcatttgcttgggttgccaaatattgaagatgaatcatttggtaattacttacaccaattgacctagtaagcccttcctttttcatttcttcaaaagctcgccaggtgtcaaaaaatgatcgttcaattggccagtgaacaagcaacaaatcaacgtaatccatttgtaatttacgtaaggattctttgacagattcaatggccttatcgtaaccttgattttcttctgccactttagttgtcacaaaaatattatcgcgcggaatggctaattgcttaaaagccgtccccacttcttgctcatttccgtataactgagccgtatcaaaaagccgatacccatcttcatatgcctttttgactgcttgattcattgtcgcttggccatctaccttataaaggccaaaaccttcttgaggcatttcatttccatcggcaagagttaataggttgtccttaatatccattgaaaatcacttcctttccttatctttaatcagtaactgaggattgtcaatatcgaaattttcctttctgaacaaactaatgtatgatgagtttaaatctatttacggggaaacaattatggctaaaatatttatcgctgaagataatcctgatattatccattccacaactcaagaattaaataaatggcaacacgatgttatcacagttaacgactggaaaaacgttgcaaatgaaattcttgctacaagcccagatctggtcttatttgatattaccctcccgacgttcgatggcttttattggattcaagaggttcgtaaacatagtcaagtgccgattatagttatttctgcggctgaaattgataccaatgtcatgcatgcagtggccgcgggggcagatgattatattatgaagccatttgcgatgacggtgcttttagctaaaattcaagctttattacggcggaataagcaaacgactgacgcagaagaaataatgtgggatcataattcattcaatccccttactaatattcttatgaacgaaaacggtactgcccagctcactccaactgaaggtgctatgctccaagttttactcagtcaccgtaataaaaccgtttctaaggagcaattacttcaatggttatggcaaggtggcaaataccttaatgagaacacccttaacgttaatattagtcggttaagaactaagctaagcacaattggtttacggcaatgtattcacacagaacgtggccttggctatcgattggtggaaaacaatgaataaacgttattttaaattattttggcgttcaatccttcttcctactattggctatctttttctcttaggtctggttgggcttttagtaattttatataatctcccaactgttttttggggcgatgtgattcgcttttctcttcccttttttatagtatggcttatcggtagtggtgcaattaaatattatcgattgcgccatttaaatatttctcagctcgataaattcactcctaccaatatgactgagggaaaacttgttgaactattgcaagatgaacaagcaaaaaacattgacacaattcgacagttacaagcaactcagcatgaacaacttgaccaccttgaattatttactcatgaaattaaaaactatttgactagtcttaatgccgcggcagaaaattcaccaactgtcgcaagtacagaagtaaaaaagaatatccaccaagctaactattatctcaatttgttgttaaatgacgaacgactagcgattaataatcatgattacaattttcaatggatcgatattgccaacttaattaataatattttgcaacaaaattctgcggtcttcattcataaacaattgattccagaattaaccggcttggacggaattaaagttctcactgatcgtaaatggttgcatttttgcattgaacaactactttcaaacgcaatcaaatactcatcccctaatagtacaattaatatttcctgggaaatgaattctttgcggatcgctgaccatggatgcggcatctcaatgaatgatcttccgcgaatctttgataatggttttaccgggaaaaacgggcaccgaacaactgctgctaccgggatgggattgtaccttgttaaaaaagttactgaatacttaaatttcaaggttagcatctcatcagttcaatcccagggaacgacagcgattctatctttcttaccagataatatcagatcatcaaactaattcttacaaaactgtaaggttctgtacacttccgtaagtaggaagttgcacagaacctttttataattaagacataatcaaaacaagttctctaccagaaaggaaaattactatgacattattaaatcttcaacacgttcaacgcgtctataatcgtaactctgccaatccagtaatggccttaaaagatattacctttaaagttgaagagggagagtatgttgcaattatgggagaatctggtgctggtaaaagtaccttattaaatataattgcaactttagaacaagctactaacggacaagcaatccttaatggccaagatctccggcagctttccaaggacgacgcagcacgatatcgacgggaacacctcggctttgttttccagcattttaacttacttgatagtctctcaaatcgcgacaacatttacttaccacttgttctagcaaaaactccggttgcaacgatggaagaacggattaagcctttaattgatcgcttacgtattaataaaattattgaccgttttccaagtgagatttctggaggacagcaacaaagaattgccattgcacgggcgttatttacccatcctgacctccttctcgctgacgaacctactggagctctagattcgaacaccagtaacgaaattcttgagctctttgatgaagttaatgctaacggtcaaacaattattatggttacgcacagtgccgcggctgctagtcatgctaagcgcacactcttcattaaggatggacgaatctatcatgaactctatcgtggtgatctttcccttaaagactaccaacaacaaattaatcagacaatgatgactttaacgaatggcggtgaataatgatgctctttctcaaactgattaattcgagttttaagcgtaatcttaaagtttacgtcccttacctcatctcaatgacaatgctagtcgctattaactatatttttaaggcagttgaaattaatcgcagtcttaaagatttaccaagtgcgacagttactaaagcattaatgcaaacaggatcaacttttattatccttgtaacacttgcgtttatgatctacgtcaatcgtttcttatggcaacagcgtcaacaagaaatgggtctttatagtatgctggggatgacgagacataacttacaagtgctaacagtcattgaaaagtgctatcttttagtaattagtctttttctcgggactttatttggtattatttttgatcgcctcgcttttcttggctttgctcatctcttgcaaattgatcatttatctcaaccttggattgaatggggcgctgtgataaatacaatcgtcatcattggcggctttttcttaattttaatggtcattgatctgatcaaactatttcagctaaatccaaacgaattataccacccccaacaaactaaaatcgcgcgtcatggtaagttctttacttttgccggacttttgggtgttgcagtccttgcctacgcctattatcttacaattacagttaaaccgcggatatctgctttaacaacattcatgactgccgtcttcttagttgtgattggaacatacctcatttttattgctggtagcatcattgtccttaaactcctgcaaaaaaacaaaggatattactatcgccctcgccactttatcgcggtttccggaatgttacaacggatggaacaaaatggtgctagtcttgcaacgatttgtttactctgtagctctgtccttgtaattttatttacatctttaactatgtatgccggcattaatgatacggttaattcttatgccccacgcgaccttacaattatcacctcgcagaaacttactgcacaacaagaatcgaccatcaattctgttgccaaaaaacaccatgctcaacttaataagcctgttacctttacaacgagcgctccgcaatacggatattgggaaaataatcgtttcatcaaccagggtaatttagagaatatgactaatcaaactaccaatacagtcattaccatgtcgacagcaacttataatcagattacggataaacatgttaaattagcagcaaataaggccttaatttattcccctgctaaagagcatcgcggtgctttacagattggtacacaaaaataccaagctactcctatctatgactttcactactatttcaatccaagtcacgcgatttattcgccaatttttataatcacaaatatgcttccggcaaacactaccacaattaacttcacaggaattaattatcacttaaatggtagtaagaaagctcatcttaactttgaaaatgaccttcaagcccagcttcacttgccaaaccaagtatattcttcccggacaaaccttcgtagtcaattgaccagtctctatggcggaatcgtctttttaggaattctcattagctttgccctaggaatcacgacaactgttgtaatttactttaaacaaattactgaaggttatgaagatcaatatcgtttcaagacgatgcaacaagttggtttaagcgagaaagaaacaaccaagagtattcatagtcaagtattgatggtctttatgttgccagtagttggtgcaataattaacctttgctttgcgatccctgcaattcggcaaattctaattcaatttaatttctataatgttcgattgatgataataattgccgtctcaattacctttatcctcctatgcctctactttgctatttacggacttactaccaggatgtatcgtaaaatcgttgagcaaggttaagtactacaaattgacatttcttattttaacagttacactttaattactataaataagtacgaccgataaaataaggagatgtcgttcatgattcttattaacaccaccattatagaaaaaattacaagctgttgctaaactactcacgacagattagactgcccttatttaggcgtggttaatctacggtattgcttagtgacagtttttaatttggtttagattatatcgaggtggtttcatgacggcagatccattaagaataggaattcttaacttaatgcatgacaaagtagatactcaactgcgatttacaaaagtactttctgagggatcctacaatgttgatgtacaatacttttaccctcaaacacactatacttctcgccctgtccctgacattgttcaagagatttcccagcctttagattttaaacaagttgccacaatagatgcttttattatcactggcgcgccaatcgaacaactcacatttgaagaaattatatatcttgatgagattcatcaattgattgacgtattagttgccaataacattccacaactttacatttgctggggcgcgatggcagctgctaactatctttatgatattccaaaatttcaattacctgaaaaaatttttggagtcttccacaattatttgcgcgcgcaagaccctctcttaaaaggattacctgatggctttcttgctccccatgctcgttatgccgaacttgatattgacaagattatgaaagatccacgattagttattaatgctgtgaccaaaaataatttcttattctcgttccgcgctcgagaaaagaatcaatactttcttttctcccatcttgaatacggaaaggatgcccttttaaaggaatacttacgagagcggaatgctaatcccggtgttgagtatatcaagccgcaaaactactttcgcgatccgcttcatatgaaagatcctgaatttagctgggcaactacccaacgagtattctttgataattggcttcattcagttgcggatcacatagctacacaacaatttgtaaaggagtaattaatatgacaaaaatcactaattcaatcgtaaatttaatcggtaatactccgattgttaagttaaatcgcgttgttcctgaagatgcagcagacgtttatgtaaaacttgaattctttaatcctggtggttcaattaaggatcggattgcccttgccatgattgaagaagctgaaaaagctggtaaattacaagcaggtggcactattgttgaaccaacctctggaaacactggtgttggcctagccatggttgccgctgccaagggataccatcttgtcatcaccatgccagaaacaatgagtgttgaacgtcggaaactcatgcaaggttatggagccgaacttattcttactcccggtgccgacggaatgaagggtgcaattgcaaaagcagaagaactagttaaagaaaaaggctactttatgccaatgcaatttgataatccagcaaatccagcaattcatgaagaaactacaggaaaagaaattcttgaagcatttggcgatgatattcctgacgcctttgttgctggtgttggtactggaggaacacttaccggggtgggtcatgcattgaaaaaagctaatcctaatgtccaaatttatgctcttgaaccagcagaatctccagtattaaaagaaggaaaaggtggcaagcacaaaattcaagggatcagtgctggctttatcccgaaagttcttgatactgatgtttacaacggaatccttgaaattaagagcgatgacgctattacgatggcacgtgaagttggtcatcaagaaggaattcttgttggtatctcagctggtgctaatatcaaaggtgcgattgaagtcgccaaaaagcttggtaagggtaagcaagttattactgttgctcccgatggcggtgaccgttacctttcaacagaattgtttaattactaaaaatttaaaaaggaaagagactaagatatttttaatctaatctctttcctttttcccattgaccgcgaccttacgtcattagctacacttgatagtatgaaaggagtggtcaatatgtatacgactggtcaattagcaaaaaaatgtaatgtttcaatcaggacaatccaatactatgaccgccgtgggttgcttcatgctaaacgaactgaaaacggattgcgccattataattatcaagaccttaaacaacttcaagaagggactgtgacataagttaagttactttcataaaaagcaaatacgcagtacaacaatggcctctaacgtccggtaaaaccgaacgttaaaggcttattgttgcttgcgggggctcgaaaacgaagtcacaagtgacttttgtctcgctctcagcttaaaagacattcaacagattattaatgacactgacaacaatattctaaaaagcctaattgttaaccaacgaagaaaactcaagcaggaaattaaagacgcttcagaacaattagcaagtctatctcaattagaaacttttttgaataaacattctgatttcccaggaaatatcagtcaaagtgtttttgacaagatcaagaaaacaaagaagttaaaacagttacgaattaaattattgcttattggtatcagcatcgacttcattctttggggtagcattctttactttcttttttatcaaggaaatttgatatggttattattaggaattcttattacagttgctttaacttggtatattgctataaattattaccatcatacttgctatatttgtcctcattgttttcataagtttagggtgtcgcttagtaaatggctttttgcccgtcatactcctaatacaagatatcttatctgtgacaagtgttcacaaaaaaattattgtattgaagaatattattaacaaaaatgaccaaggcgcacaattgctaaaccttggtcatttttttgcattttatagtattggtgaaagcaagcgagaaaagtattgcttgaatttccgccactttgactgattagcaaaatactcaggagtaagtaacgtactctttttcatgtcactttcaaagtcttgctttaactgcgctgttagtttttcattatacgcaaatgcattgacttcaaaattaagtctaaaactacggtaatccatatttgccgaaccaacagaagcaatgttgctcccactaaccatcgtctttgaatgaataaagccattatcgtacttgtaaacttttaccccgttgttcactaagtatttagcataatattccgttgcccgataaacaaatggatgatcaggcatgcatgggatcataattcggacgtcaattccacttcttgcggcaattactaatgcttccagcactgaatcttctggaataaggtatggcgattgaatatagacgtattttcgggccgaactaataattgattcatatccccgtcgaattgaataattttcattatccggtccagaagatacgatttgcattggaacctcatctggatcgccatctggtgcaaccagttcaaaattcttaaattctttttcaaggtcaattttctttttatgagtttttcgacaggttgtattccagtccatcgcaaaccgcactgtcatcatcatcgttgcttgtccgacgacacgaaggtgggtatcacgccaatagccaaacttaggatcttcgccaaggtattgatcaccgatattgaatccaccaatgtaaccaatcttgccatcgataatagctagtttacggtgaagatgataatttaaccgtggcgtttgaaaataagctttggcagcagcaataaacgcttgcgcttctccacctaattcttctaaatgcttaaaaaatttgaaagtagttccatgagacccacttaaatcatagagaacacggacttttactcctcgtgcagctgcatcttctaaggctgccaacacccgcttccctagattatcagcataaaaggaatagtattcaatatatacatgatcagttgcatgatttatatcgtcaattaacttatcaaacttctttttcccatcaataaatacgtgaactttattattaaaggttactactgaatcattcaaactcaaaaaaaggttaaccaactgacgatcacgcgacaaccggcttccttttggcattaattcatgttcttcacttaattttcgttgtttttcaagatatttagtccgtaattgtttttgctcatcttgaatactaaatatctcatcatgggataattgtcgtcccacaaaaagatataggataaatccaactactggcaaaatagttaagactaatagccatgcccaagttgatgcaatatcccgacgactacgaaaaacagtccatactgcaaaagcaatgttaatcaaccataggacttcaataatgcggcgaataacatcccatgtccaaacaatatccataatttaataatctccctagttgtattactgattcattatagccattatttgcttacttttcagcaggttcagagattattttcggtaaaaacgacgaagggcaaaagataacccgatcgctaaaagtccgtacactgcacctacatagccaagcatcgttaaattagcaaagttaacagtagtagaagccgtaaaggatccaagtgaaatcccaacattagcaaaaattgaaattaatgatgttgctaaagctaatgactgcggatattctttttctgccacactaataaataccagttggatagttgttccatatataattacaacgacacaaagagttgctagaacaagcattcctgtaatcttatttcccaatgcaatcccaagaataagacttaatattgtcatgagaataaagacaaatggtaatttttgaaccccattgtgactcgcaacgattccagcaatttcgttaccaataatactcattacccctaaaagaagcagcagccaatttaaactagttaagctaaagtccatcacagtagtaattagcggccggacataagtatagaaagtatactggagacttaagaccgccaccgtgattccaatccctaataaaacacggtgatcttttaatagcgctaattgttctaaaatgctccctttaatttgatgtgtatcacgaggagtaagccagactaacaacgcaaacacaattaatgttaatcctgaaatgatccaaaaactatcgtgccaggaaagtaatgttgcgatggttgtaccaagcggaaccccaatgaccgacgcaatactaaaacctgcaccgacccacgctagaaccattggccgcttgtccattggtgtaattatactaactagcaagttaattaatgaaataatggttccagcaacagcggcagtaataattcgcgcaaataggagccagccaagtgttggtgccatcgcagttaaagtattaccaataaaaaagacggtcattaatagcataagaagattatagcgattccaattgctagttaaggtagtaataattggcgtactaatcgcatagactcctgcaaaagctgtcaccaaaaaaccaactgtggaaagtggaacatgataactccgtgcaatatctgataaaacgcccacaaccataaactcattacatcccagcataaatgcaacaagaataaaagtgaacgatcgcaatttagcgtgcttcacaataaacctccttttaaaacaaaaaattttctggaaaaagtcaatccagaaaattataaacgtttaacaattaatttccaatagttttgaactatttagtttaataaggttgtgagtgataagcagtaaaggttttatcatcaaagcaaaccatcgttacttgatcaacataattggcattagggagaaaatctttaatcgtcctaatcgcaatttttactgccttttcaagcgggaaagcatatacccctgtactgattgaaggaaaggcaaccgtccgacataaatgtttatcagccaacagtaaactattgtgataagaattggctaacaattgatcttcaccattatcaccaccatgccaaatcggtccaggcgtgtgaataataaacttggctggcaagttaaagccgccagttatccgcgcttctcccgttggacatccatgaaatttttcacaggcgccatataacgctgggccagctgctcaatgaatcgcaccatcgacaccaccgccacccattaaagttgtattagcggcattaacaattgcatcaacttttattttggtaatatctcctttgatcacgttgatttgcggcattatttagcccttctttctttaaattgcggaaataaccagattaatcctgtaaaagcaaaagatttcattgctaccataaacccagtaatgaaatcttgtaaatcgtttttaccaatatggaacactaaactatctaatttcataactaaaatagtaaaaattaataaagttattaagattttaatttttcttttccaactcatcaattcccatttactttgactaattaagtaaagtatatttatggaaaataatcccaataaaatgtaattaataatccgccatttctcactatcaacaccaatataaattattccgcttgattgaagtaagaaataaatacatccagctatattgataaaatacaaaacagttaaaagttgttgtttatgtatacttgttctgtgctcttctttatagttatttatcatctcatgatcctcccgtaataaatcatccaaactaacatggtagaggtcacttatttgaaccaacataaaaatatcaggataacttcaaccattttcccaactagaaattgttttacgtgagatcaacaatcgttctgctacatcctgctgagtccatcctttttgataacgatataatttcattttatcggcaaatttcaataagttctcctaccttcaattaaatttatttcccgggaaattaactatgcttaagctttaccgaagaaggcgatatttgtcacgctaagaatcatagcaaacaaaaaggctggagaaacttccaaccttctgtaaatcttaaattaccaaatatgaacccgatcttctggcgcccggtacatttcatcgctaggcttaatgtcaaatgctgtgtagaagtcatcgagattttctgcttgaatattagcacgtaatttttgcggtgcatggacatcaattgaaagcagtaattgcatgtattgttccgttgctttcattcgccaaatagttgcccagttaataaagaattcttgggcattgaagtcagcttcagtttttgctgcttcaagtgcacaactaaggcctcctgcatcggcaatattttcagaaaccgtgagcttcccgtttaccttttgcccagcaaatgggatcccatcaaattcttcaatcatcttttgggctaattgcttaaagtgtgcagaatcttcatctgtccaccaattattaagatttccaaactcatcaaataatgacccgttattgtcaaaggcgtgggaaatttcatgagcgattactgcgccaatcccaccataattttggctgctgctttgtttcaacgagtagaacggtgcctgtaggattgcagctgggaatacaatgatattcttaaatgggtgatagtaagcattaactgtggccgcactcatttcccatcgcatccgatcaacaggtttattccaacgactgaatagttctttattagccgtcactgttaattgatttaggtttgcaatcaatgattcctcttcatcaaccttaaattgatcatagagagcaggaatcttatctggatacccaacttgaatgcccagtttatcaagcttgaggatagccttatcacgggtatccttactaagccattggttattggtcaagcgtcctttatagactttaatcatttgctcaaccatgtggtgaacgtctgctttggcttgtggtccaaagtacttcttcccataataatccccagctacttgactaaacatgtcgcgggcaagataaaacgcaaatttacgttggctaactggtttcttgcttccagaaagtgcccgaccataacgtccattgatttcacgcatttcatcatcaaggtaactggcattttcgcggatgacacgaattaatgcccagtttttaaagagttcaaaattatcttgtaagatcttattcagggacttaaagtattccggttctgtcacaattattttttccggttcttccccaactaactgcttaattattgccgcaatatcaagttgatcagtggcactagctagttctgcaaccgtttgtggattatacatcttactataatcagccgcttcttctgcactttttacatttggcgcaagaagggcatcgaatttgattgcatcatcaataatcttttttgcttcttctttgctataccccaacttatccatcaaggcttccaccattgaagaccataattggagtaattgatcgtgctgagccttcttttctgcttcatagtagctcttatcaggcaaaataagcgatggtgatgaggcaaataaagcataaacagtcgcattcttcatatcagcgtcaatatcaaaactaatcggtgaaggcatccctgctaaaatccagttcttccattgagattggtaatcttcatatgaattaagattttctacacttgccaacatccgtttaagcggttgtgggccaactttcttacgccaatcaaactttttagcgaggcgatatagtttaatcatttcgttaaaacgcgaatcctcagacttttccttcccttctgcataggcatcaaagtcatccatcagttgcttgtcaatgtcatcaacaaggtcattgaagcccccggtagctggtttatcatcaggaatcttcgccgtctttagccattccccgtttactgcttcgtataagtcgtctttaattagttcgttattcactgccatgtgcagggcctccttaaaaggttacattacttactattatactatgcctactagaaattcacgtaaatttgcttcaatctaaaaaaggacttaataaagttttccgtgcactttctgaaaaccatgagtcatgttgcatcagtaattgatttacttcctggtaattacttaagtcaacctttcctttaattaatccagcaatttggagctgccgagcaaattgaacatctgcggactggagaaagttgcgaaaaatcggctgttcatctggatcccaccgcttattaagaagaccaattgcccgctcatattctttgctatgggtaagtaccttttgcatggcctgtggatttaaaattgttgtcatcaattatcccctcatttctaatactcttcccggtggctcttttactgataattgattagcctttgtcatcattagccaataaacattttgataatgataattattgattctttcctctccccacccatcagtaataataataattatgcgatttcgtttagttagatggtgttgatggagatagtcaaaaatacactgaaaacttgtacccccgccacctgttcgtctaaaatcaagttttttaccatcatgtagtttttgtttggtggtcacccgggcatcaaacgaataaacattagctgtcagttttgttttcttaagcatcttttcaagtgtcgttagtgtttgaacgatttcttgatcggtgaccgatccggaattatcaacaaaaatgtcaatggctggatccaatctcgtaactttgccaggcaaatccattcgtaatggttgccggcgattaaagcgagcatgcgaattaacttgtcctcgtgcaatcaacccaaactgatgcctaaaaacctgccgccaatcaactattttagttttttggactttctgtagctgtgatcttacatttcctggtaacaaaccgcgatctcgttgcggggtttgcctccaggaacgattcaaaatctgcttaatattcgctaagcgcacgacctgattgctgatctgctgacttgtcttagattgctgccagccgttatgagtatcagctattttaacctcatctgccgttgcattttcctcttgtttaccaccattcaatttaagacctggctgatgtaatttttcttgctgttcagcaggcagctgttctaatatattgagataatcctgcgaatctaattttggcattagtttttgacgaagagctttctccaattggctaagggttactgttccctgaggtggctcagttaaatactgatttaccgctacatcagttgcaatctggactaaatcttgatgaggataagaagcataacgtaatggatgcatccagataagatgaagggcttcatgttctaataagctttgaagttcatcattacgaacgttcgctaacttttctggattaataaccagtacaaggcgattgtcttcccacctcaatcccatcattgcgggtaactgtaaatcattctctcgtggaagttgtaataacacttctccgaaaaggcgctgtttttgaaggatgataataattgcctccctaatccgttgcgcagatgtcacatgattattgcttccatcattttgatgtaaccgtgatagaaagtccactaaactcatcgattatcaccactcgtcgcaacttccgcaaaatattgataaagttgcgctacagagccttggggatgtttaatggcttgctcatacattacttgcaagaggtcgacgaaatcctcaccaactgtttgaacaatcgcatactgcccatcttcactgactaattggagatacttaataaatagagctgcctcttcttcagatgctagcttaggacttagccatgaacgtaatacttgaattttggttgcttcatcagcattttcaaactgctccttgccatctttagcgtctttcaaggttgccactgtaagctcttgcccctgtgcaaggacaaactgagcaaaggccacccctacttcatcacctaagtcaccactaaatatatcagcagcaagttctttttgcattttctggtctaacgcctgtaattgatcaagattgcgagaaactctttcccaagcacgtggcgtgggagccaaatcttcattgttcggatcaacaactaataattgttcaggatattgcgtaagataggcggaaacaaggtcattaattccggttgcttgggcccattttaaccattccgccgttgaactcgtcattactaaacgaactgtccgatctttaattgcagcatccccagtcgcaacaccatattcacgatcagtaaatcctgtcatcgtagaatcaggattttccgcaataatgatccgtactgcggaaggcaaacgcaaagcattaatctttcgttgaaggacaaggttcattagttcactttgaacagcttgcgttccacgattaaattcatctaaaaaccaaataattgattgattaggatgggcttcggcatacttaataatgctaattaaagtttcagagtaaccgaattgtacatttgcaagacgaccataattcttcgtttcaacaaaagattcactggtcaagggggaaccggaattgcaaggtctcctttttcgcttaagctgacaaccgtagtaaataatgccgcattcagattagcagcaatttcacgaactaaagcagatttaccgatccccgcatccccgacaatattcggaacactacccgcatcgagaacaacgggaactgccgttaatagttgttgataagttagcgccattatttaccccttccaaccatgacattccagatccatgtcttgttttttcacgtttgatacatagggattgccttttacataaaagcggcgtggacttaacccatctttccccttcaaattaactccaatccgcgcagaaatagctatttctccaggaattttataattatgtaaatcaaccgttagtggacttgtttccataggctgcccatctaaatcccgtgaatgaattccgagagcttgtactaatttaccgggaccgttagtaatatttacccctgacatgtgccgattttcgatcattttatcgatgtttagcgccggttctattccgcgaagtaaaattccttgaggttcctctgcatcctgaaccacaatatcaaaacaataatgtccacggatttggtataggtaaatattcccgggcatcccatacaaagattccgagtagccagtgcgtcgtccgttaaaagcatgtgatgcagaatctttttctcctaaatatgcttctgtttcaacaatataaccaccaatgattccacttttagtttggtattttactagtttccctaaaagatccttcgcaatttcgactgtgggccgtccagtaaaaaattgttgatattttgttagcatatttattttcctcctaaaaagaactatcctaaacataacactaattaaaggagatcggcatgatggaactaaaaattgaacgaatttatactaaacctgttgatttagatggttatcgtatccttgttgaccgcatttggccacgcgggatttcaaaagaaaatgcacatcttgataagtggctcaaagaggtcggcccaagtaccgagctgcggaaatggtttggtcatgacgttgctcgttatccagaattcaaagaacgttatctcgcagaattaaccaacaatcctgtttactataattcattaaaggcaattgtccaaagtaagttgccgagtcagaacgttattctcctttacggggcaaaagatgaagaacataatcaagcaattattcttgctgacaagctccaaaaagatttacaactcgctataaaataatataattttgtattttttaggaataatttgttttataataatagtatgaggattttattcataattctctagtgcccattgtttcactgacttagttatataaattccttttgaaggtatcaataccacaaaggatttttacaaactttttagtgactttttctaatcgtgtaattagaatcacgggtaccaataaccccctagtttcattttgaaacaattatctgataaggtggaagtctattattgaagtggtaggtagacttctgctttatatttttaaatcaattatttgtcagcccaactacgaccatcgagctcaccggcggcattgactaggcgttgtgcttgttcaagcattaactgctctaatgcccggtaaaaagcttgatcttcatatgttgggctatttttcattaatttttttaattcttcgtgtgcccattgttgattctcatccattttagtcatcctctttttctcgaagccatccgatagaagtatgtaaatcatccagctcctcttgttgatcttgtaaaagtgccaataattgttctaatttagcttgttgaagaggatctaactcttgagcaattttaacgttaaggtggtcaataaaccattgcgtctgattgctaaaatgcaagaatttatctaaggtcaaatattgctgatagtggataaataaagactgccgctcttcttcactctgttgggcaaattgatagatcggcaatggtggcaaataattcatccccatcgcgtgcgctaaagcctgatatggtcgtaaaagttcagcaattgtatatccttgactggcacccggttgaaatgcagacgcagaatgagcaaccgtcgtaacaatccccaattcacgaccctttagcaaatgactgcttgtaagttgtgaattccatacctcatcaagccattgctttaagatcgccggcgcactataccaatacagcggaaattgaaaaataattcgggttgccgatttaagtaattcctgctcttgagaaatatcaaaaggtgtttttaattcatgccacataacgttattttcatcatcagcggctgcctttaaaaatgattcagtcgatgaattcgcaagttgagggtgagccactattaccagtgttttcatcaatttcactcctttaattctgcaaggccttgtttcaagacatcttctgtaacatcgacagttagaaatcgttgcagaggcgtttcactatgacgatccttaaaagccattggttctgcttttagaattacaacagtcaaattattttccgtcagcattaactgacccggatatttaaatttccccttagtatgttttccagtccgccaagtatgtaatttagcctcaccattctggtcaaatttcaactgatactttccactagcatctgtttcgacgggaatcccggtaaacttttgaacatcatacttatcttttttacccataatatatccttcttagtaattaatctaattttacggttccacttttaattggtccgcataggcattaacctcatcctgttggtcttcacttgtgtagtaattatttatcaaattcgtaacagtggtatgcgtagtagtcattggtgcccctgtcacattttgattttcagttgatccaatcattttaattgtgacatcattgcctttacgtttaaaccaaatatagctagtcaaatcaccctgtgttgttacatattgataatccgcaacttcaccataaccataatgcgttccataatacatttcaccattttgaactcctgccttaaaccaatcagggttctttaacaatgcaactaatgttcctagctgctgggtagttaatccatccttatccgtaattgtaactttaccacgcatatcaataattttggtgttttttgctactttcaaaacacgattaacttccccatgagttttggcatacgtcaccatttcagcgagtgttacgcctgttttgcgaataccattactactgttcgcatagtaaaccttatttccgacaattgtataataggttgaatttaaacgatcgccatcttcatcacttttggaagttaatttaatcatgtataaaactttggcgcctttaggataagtcttagcagaggatccctctcccatggcactgcacctttatcataaatcttaactgttgctccctgattattgttttccatatcagcagaataatcataatcatttgctcctggcatatgtgcatcacgatagtacaacacaagtgcagcagtttgcttaagtgttaatcgttcagcgtttagtgctgcatcatcccttatttgttgtgtacttgataaagaactagtcatactactagttgatctattagtacttgaggatgttctcccacaagccaccataaccatcatcgtcaatgaaagcatcaaaattagcgctatttttctcataaagatactcccacagatcttatatttaaagttttattataccttaatctttaggagtcatctaaaaagcctctataatcgatttggagacttccttttcattttattcagcaaaataatccttaatttctttgtctgacaagtcaaacttttcttttatctctttcttgaattagctgttctttttctttgagtcgatcctggccttctttaatttcatgtttacttttctgaagttctcgttttccttctaaaagctctcgttttccttctaggagttcacgttttccttctagtatctcccgtttgccatcccgtatcctacgttcaccctcacgaatctttttctcgcgcatttcttgatccatttcatatactgaacgtcgcatgtattccggcctccatttccggttccgctttacaactgctattctctcctttaattttacgacaagcggatcggtcgcttcaacttttcgttgggcaatatcgtggaggtcagctacttgcatctcaacatcataatcaagcatcactttgttgaagatatagtcatcggctaagcccgccatctcctactttttgcgtaagaattcattcatcgttatatcccccgttaaatagttctataaagatatatacgtaaaaggcaaagattttcacttttctactcaatatttttccaatgtatcattaatgcatattaataatgctttatcttttggctatggataagattcaactataatagatagtgaaaagtaaatcttctttattaggtattatctatggtatgtgtagataggatgttgaaaggaagcaatactatgttcgacgttatcttttggattcttgcaatctggtttgtagtaaacgttgtatggatgtggtttgcccttgataaccaagttctacaaaaaacattcgcatggattaatgtatgtgcaatcgtaattggtttttgggtatattacggcatgactcacgacggcaacgcccttaacggctggttccttacaatgaactgggtaaacattgcaattgctgctatccaattctactttggttatcgtgaaaacagcgttatccacaacggtcacacaaccgcatgattgatttacttttcaactagaactatggcttggggtcatggttctttttttgtaaatcgagtaggagataattgattagttcaattatcgacctctcacaccaccgtacgtacggttccgtatacggcggttcgacaacttaatcacattgaattgactggagcgtcttggacatattcataagtccgagttgttccagttttctattagttagagaatagctcaaggtcttactgtgtgcagttcgccagtagcccttgcgggtactagcgaagacatatgcatcacgctgggacagccccagcttctgtaagttagttaccttagttttaagcttcttccattgcttccagatatactgtcttattcgggccctcaaccacttgtcaaggcgttgaataaagtcagttagtttcccaattgagtagtactgaagccatccacgcatttttcgatgaatttcttcaaacattcttgtcagggatattccacgattacgtttagttaataacctcaatgctttctttactcgttgttgcgattgttttgctggacgggcgtaggctccattgtggtctacacccaacgaaaagccaagaaactttaaccgtagcgggctaccgactttggttttatctgggttcactttaactttcaatcgcttttcaagaaactgggtaatgcttcgcattactcgttctccggctcgttgacttttaacataaatgttacaatcatccgcatagcgcacaaagtggtgaccacgtctagtcaactctttatccaactcatttagatagatattcgccagtattggtgacaatggccctccttgtggggttcctttttcactcttagcgaaaagcccatggtctaagactccgctagttagaaacttacgaatgagccttagtgtccatgggtcatcaatatattgttgaagatacttaatcatcaagtcatgattaacattatcaaaataggcttttaggtctaagtcgacaactcttcgataaccttgattataaagatctactacttttgcaatagcgtcgtgagccccacggtgagggcggaagccaaaactattatcagagaaaacacgctcaaagataggtgtaagaatttgggccacagcttgttgaaccattcggtccaccactgttggtattccgagttttcttactccaccattaggcttcggaatttctacccgtttgactggtgctggtttatacttgccctcacgcaaactagcgatcaattccgtcttattttctctgagatatggcagaaggtcattgactgtcatatcgtcaatgcctgctgcccctttatttctcttaactcgcaaataagcctgattaaggttattgcggtccaagactaagtcttggatagtgacactcatacctttaccttcaccataatcggtactacgcgcccttgtgtactttcggttttccaaacctatcctcgacaagcggtcagcttgttgttctgttttctgcgattgtcgcacctgattacacctccgatataagttacaagttattgtcgttcagtccttcatctgattactcagactactatgacctcggctgacttctggcttactcaacgctacatcactgcaccgcttgtttctgtggaaattaaacttattcctcttgtcggaaacgtgtaggccagatctccccgggtaaggatattaactttcgtaccatgtcaccggtagctttactgaaagtaacttcgagtagtgttggactttaacttgtcatgcagtcttatccagttagttccagccttatagctacttcttgttcatcggtgcagtactttgccttagacttccttcagattccacctcgcagtggacacccttgtcctcagctcatggttccgactactacggcccatagcggactctcaccgcctagctaatacccatgccgggcgcacaaagaagagagtatggaaaaactaaaattttcccacactctcttttcaatttttcatattgatgacttgaactatttaaattctaaaacatataaaagcaatttattactatgcactgaaaatacacttacttcttcccaaacaaagctgccatctttgctgctacttcgggatcaagattatcggcaagcgtactttcatttgatttttgttcattttgctgattagtgatcgtttgcttaaggtcatcaatgactgcttgctcaccaacttcaatcggattaaccgttaaccggccacctgcagcatcagcatgaccgccaccattaaagtatttttcagcaaatttagccacatctaactttccgttgcttcgaagcgacacgctaaccggactgactaccaaggccgcatcgacttctggatgttgcactaataattcgtgggcaatttcagatttatagtcacttgcatatacgacactaaatttatgatcatcgatatctgtaattaaaatatctttcaaatggctcttaaggtactttgcccgccgttcgtttagtgtccgaatcaacagccgattttcttcctgatattgttgccagctggtattaaaaacattttggacaaactcttctgaatcttggaggggataaaaccaaaagagctgatcaagattatcggcatcaattctttcctgctcattcatttctggatcattttgccaatcccaagtatcatatgcccgaatcaattccacaagataagcaaggcctttttgccgttgctcatcaatctttgtaaaagacgattgttgttttaaccaatcccataccaagcttgtggcacttgggttaactgttggatcagcaggtacgatactattggccgcatacttttgtcgtagttctgcttcactttcatgatggtcaaagacaagccaatgattagcgaaacgttcattcaataacttaaatgaataatcgctatctggcgtcatatccatgatgtaaacatctgtaaatcgccctacttccgctgtttgcatccatcgacttaactcttcatcgattcgtccagcgccacagtttgtcatatcaaactctgtgtcttcaaacattactggttgtagtgtttttaataataatggagccccgaatccatctaaatcattgtgggaaaataattttattaaccgttgtgccatttttgatcctcgcaattctgattttgtttcttattataccgtagaaaatcggctaaaccacacttaattactgacatcacgctaacgaactgctatcattgaaattagtaactcattttaagaaaggaaaataatatggaagtttatgattatcgtcaagaattgattgacctcttaaataataccgctgatgatccacaaagcttactgcagacacagcgaagtcttaccaccattcttaatattttaaatcattaccaggaaagcaaacccgttaaacaaaatgcaccacggtttgttcaacgcaaaattcaatcgtcaaacgagttgcctccgcaagcacgcaaaacattgaagtcactgcttaccggtcctgctaatgatgaagagaagccaacctcaacggcaagcccagttgcatctccttcagttgaagcaccaaaagaaatcaccgaagaagaacgcctagcagccgacaatcgctacttagtacaccggaaattaagtggagccgagattaatcaccgttactacccggaagcaattctgcatgcattaccatttcctattgaggatggggacattgcccaactagactatgaacaaaaagtccgcggccttccagttattcggcagattaccggtgaccaccttagcgattacactcccgaaaaagtcaatgtgattgaatatggtgaattaaaacgcgtgcccggttctgatgtgcttcaactgagtaaaacaattaagggtaattcaatcgttgacgaagcgccagaaaacaccatcgtaattgatccctttaagtaccctggccgcgatattaagccaggaatggttattgattttgcctactatgatcgaggaaatggcctaactgataccaaagatggcgcgattcgctggattcatgaaaagcaagattatgatacaactaagcaaccagctaaaccaaaagttgttaaaaagcctgctaattctcgtcatgattatgagaaaaagctggactatgaccttcatcaacgaaaggtacttgttattaccggaatccgcagcaaggttaagggtcttaaaccagtcattgacaaacaccacggtctgttccgcggattagatgcgtctgcagaagaaaaagtttctagcagtaaattaaaacgcgaaattcgtgatgcagactttgtgattgtctgcatcgatgcaattcaccatcgaattagtcaactcgccaaccatcacgctaaacgttatgaaaagccacttgccattgcaaatgttacttctaatactgctgttgagcgagccattgcccgggcattaaatggtgatcctgcatacgccgaaagtagcgaagatttgaaaaattataaataaattttaatttactgttgacttttatgagaaataggttaatattaatgacaacaatttaattattcgatcgcaatgagaaagaagagtatgttagacgatagcttcagcgagtctcgtttggtgtgaggagacagttttaactctaattgaaaatcactttcgagtctacagcttaaataccagtaagctgtagtggttacacccattatcgtgtcagcgtatcgccatgatggccgtacgtgtgaggtattgttagcaatagcagtacaatgatagggtggtaccacgctcagcgtcccttagccagtttggctaagggacttttttgttgggatcagattaggaggagaaaacatgcaagatttaacatcgcgcaagttaacattcaaaaactatttagttgttgcatcattgcttttcggtttattctttggggccggaaacttgattttcccgttacaccttggtcaattagctggtagtcattggggaccagctgcagttggctttctgattactggagttcttttaccacttctatcagttctcgccgttgctgttacgcgtgcagaaggggtctttgatatcggtcgtccgcttggcgtcggtttcgccttagtattcatggttcttatccacgctacgatcggtccattattcggtacaccacggactgctactgtctcattcacagttgggcttgccccattcgttgataaacaatatcaatcccttgccttgctattattctcagctttattcttcggggcagccttcctcttctcataccgggaaaatgatatcttagctaacatcggaaaagtattaaatcccgtcttcttagcccttttattccttgtctttgttgttggtttcgctcgtccgcttggtaaccccgctaccgcacctacaactagtgcttatgttcacggtgcgctcactaacgggttccttgaaggatacaacactatggatgctcttgccggtcttgcatttggtgtaacagtggtaaccgccgttcgttctatgggacaacggtcagcaaaagatgtatccaaagtcgttgcaaaagctggtgtcctctcaatgggtgccgttgcttttatctacttattactaatccttcttggcgcaatgtctcttggtcgtttcaaagtttccccagatggtggagttgcctttaaccaattagttaatgcttatgccggtgcattcggacaagttgtactagcattcttgttaactgttacttgtttaacgacggctgttggtttagttgctgcttttgctcaagacttccataagcactttccaaaagttagctaccatgcatggcttgccctcagttgtctcgcctctttccttactgctaattttggcttagaccaaatcatcgcttggtcaacaccaatgttaatgttcctttacccattatcaatggtgcttatccttttatctgtgacatcaccactctttaaccgtgatggcgttgtctacttcttcgtggtccttttcaccgttgtaccagctctcggtgatatggttgttgccttcccagcggttgttagccaaagttcatttggcttatctgttgccgctttgcgaaataacttaccacttgcaagtatgggattatcctggcttgttccagcacttgtcggcttagtccttggtctcttagttcactggtaccgtcatcaacgggttgcttccaccagtatgcaaagcgaagtacattaataagtgtcttataggttaaaaagcgtgagaaatggctcattacaagagtcgtttcccacgcttttaaattattatttaacattatcgtattgggcaagattaaacttcttaatcgcatagatcagcttgctggcataatctggatcggttgcgtaaccattccgctgtaattcgtaagctgcctgttgataagtttttgctgtttgtactccatggaaacgtgcatgattatcagcaattccatttacaatgagcaatgtgtgcgcattaattgaatcagcccagctgttgtaaactgtaaagtattgttttacttgaacatttttaccccgaatattttcggtagtatacatttgaaccttttcgtcgtcactattagctttaattccaaataagttattgtatttattcgctaaccggctccgaccccagttcgattcaagtcctgcttgtgcaatcgtaatgctagctggaatatgatacttcttctgttcacgttgagcagctggcgcaatctgacgaacaaattcattgacggttatatctgtcgggtgggtctcacgttgaatttggggagattgatggataataatcgccacaatcccaaataaaataatcaaaaatgcaagtacacttccacaaatgatttttgtttcttttttcatgacgtgtctttcctttttatgaatttgacgctattataaccacttcaccatgagaaagcgagaatttacaatgatcttatttacttttaagctcgtttttatagttacccgaaatgtcaatttaagttagaaagaaagtagttgctcatcagtgacgtaggacatgaatacctcatatggagttcgatagcctagtgatttgcggggcaggttatttcgcttactcatcagttgggtcaccaattcatcaggaagattgcggaaatctagctgttttgttaagccgtcccggcgtaaaagaccgttgttgttttcgttcagccctcgttgattgggagcaccaacctcggcaaagtaagtgtgaaggtcaaattgattggcaatctcgcgccagccggcgaattcttttccgttgtcaaaggtaatcgatttgaagaagtgctgcgggaatttccgaagccactgacctaagtgttggttaatcgcatcagccgtcttttcgtgcacattgagtacaatttcgaccttcgattggcgttcggtcagggtcattaccgccccttggtgctttttgccttggacggtatcagcttcaaggtgtccaaattcagtggcatagtgcggaaagtccttggcacgctcgtgaatacttcgccccaattggccagccttcccgcggcgctcaatatagccattcgggtgccgcttacctcgcatgggcaaagcacggacatccaaaccgaactgcccccgttcaaacatccggtaaagagttcgccggttacaactaattgggcgctcagcgcgcccaataatggtgtcaggcgtccacccctgggcaattttgtcgttgatataagtaagttcagccagtgacaactgagtacgttttcggccacaacgttgcttattgcgcatatagtgatcttgataatcagcaattgaggcaccggtttccaggtaacgataaacgcgataaacggtttcggcgctacggttgatcatttgggccactcggtacgctttaagcttttgcacgaaagaatgggcgatgattgtcagctcgtttgtggtaagatgggtgtaagtcatttgtggtttcctttcttttgtttaggggtattcaaaagtctaccacaaatggcttttctatttttctaacttaattttacaaacggcgttattaaagtatttactatcagtcatcttcaatttaggaaagctcttgattagccggcgatgattccaactcaattgcttaccagctccctctttgtttagatgttgagcaaagtaccgttgccaatcttgaaggtgatctttaattgctaatttatccttaggagctgctttttcaagttgatccagcagtttctttcgataagcggctgctcgttcatcccattgctgagttgtaatatggaatttttccacactaataacgctgagaatagtgtcagttcccatcacgaggacaataattagggcaagcatcccgtgggtccatgattcttcccagttaataatccgctgaataaatggctgaacaaacttaaccagcaagacaacgccaatcccccagaaaaatgaaatttggagagcaactcttccttgaatgtttccttttagatgcgaatagtcccataacttcatatgaaaaagtttttcgagcagccaacttgctacatactcaaagatcgaagccacaataacccctactacgaatagcagaaaaatattatcttgaaacggataggtagtaatcaaaatcgtcgtaacggcaaatccatatattggacaataagggccaaataagaatccccggtaggtgaaatgatggtccttaattgaacagtaacaggtttcccataaccagccaataaatgaataggtaaaaaataagacaatgatttcagaaagtgaatagggcactcgtttcccctcctttttgaattcattgtctcatatatttctatttcaagctaagcttttcaacgttcaggatcttatcaagccatccttcaaagaatccttgttcgtgactaactaaaattaaatttcccgggaaatcttgcagggctttctttaacccttccttagtttcgtcgtccaggtggtttgtcggttcgtccatgataagaaaattacatggggttaactcgagaatggcaagtttaactttcgtctgctcgcctcctgataaaagattcatttccttcattgtattagcagcgttaatcccagcccgcgccaactttgtccgaatcgttcgtggctgcatcgttgggaacatattttgaattgtttgcagtggcgtaagcgttgggtcatcccactccaaatcttggtcaaagtaatttatccgggccgatggggagaaggttgctgttccgcccaacgctggaattttctttaaaattgatttaatcaaagtcgacttaccaaccccgttaaatccggtgaacaataatttttcacccattgtcatcgagaaagttactggcgctagtaatggtcggttataaccaactgataatttttctacccgcaacgcatttgctgatccggtattttcatacggaaaatggaaagttgcttttagattatcttcgggtggatcaatctttttcattcgtgcaagcatcttttcacgcgatttagccatagtcgattttgaaccggccttgtttttccgaataaaccgttgcgccttttcaatgaccacttgctgcttctcatattcccgctcttgggcttccttccgctcttccttttgccgcattgcttgttggaaacttccgcggtatttggtaattttaccaaatgacacatcacaaatggtattcgtaacttgttcaaggaagtcatagtcatgcgagataatcattgcggcaccatcaaaatcattaagatagtcgattaaccattcaatgtgagctgtatcaaggtagtttgtcggttcgtctagtaagatgacatctgggttctccaatagcatcttcgcaaggataatctttgaccgttgtcccccactcatctcagagacaacatgatccttaccgatatcagttaatcccaaaccattcattacccgctctacttccgtttcaatttcatagaagttattagcatcaagtttttcttggattcggcctgctttggtgaggagctcatcatccatcttttctgcataatccgcataaagcttattcatctggtcattaagctgataaagttccgtgaaagcagtatggaggaagtcaatcaatgtcatccccgccggaatatctacatactggtctaagtatccaattttgactcctttttgccatttgatagtgccatcgaccgggagggttttcccgatcaagattttaatcaaggtactcttcccggcaccattttgcccgacaatccccatgtgttcgtgcttttctagttgaaagctggcatcttcatagagctttttatcggcatagctcattgtcaagccttcaacatctaatactgccattctattctctcctctttttcttacttattacgagctaaaactgctatccatactatcatattttaggcacgagcttcaatttattggcaatagtcctactttaatgaaacaaggagccaccatatcattcctaaaataactacaataatccactatttgtctcgatgatgatcttaaagaaattagcaaaatacttagaaccaatgggattgagcatcaatagttattttaatatggctgtccggcaactggttattcaaaaaaaattccctttgaaatcctggctgaacaagaagactctaatttgacaactcggcgtgctttaattgaagctaaagcgaaggacttggggattattcctgatggttcgcctcatttcaaaaatgttgatgaagactaatggatgaattaatctacaaaccctaattcaaacgagactatcaaaaattatagtccgatttccaatattagagggttaaaaattaatagttaatttccattctctataatgctttatttctgtcatatcaacgatgcaaataatatttgctagcaatacgtattcagatataataaccttatccccatagaaaagaggaattaaagtgaaatttggagatcgcattaaagagcaacgtattaaattagaaatgacacaagcaaatgtggcacaggaactttttactaccagacagacaatttcaaactgggaaaagggaaaaagttaccctgatttagatacgcttattaagattagcgatttataccatgttccaattgattccttattgcgggaggataaagatttgaaaaataatttagatagaaaaattacgaataaaaaattcacaccacttttcatttttataaatttcggcattagcttttggtttattcttcagccttacataataactaatcatttatgggcaagattaggaaatcttggattagcaatttcgatgctgggaataataataacggctggtcactttagcgcatatattgaagactcacctcttataagaaaaattaactcctttgttaaggaaaaatttcttaggaagtctattgttatatctgtgattattttggtactaattatttttacgctatatcctacatcagtctccctatcaaataaaacagatctttactttggattttttgtccttattctagcaataattaatgttattcttgaattcgcaaattggatactagatagactactagaaaaaaggtaggtgataaaagatgacaaagtaccaaaagacggtaagaggacgaaatccgcaactaggtaatagtttaatttcactaggtcctcatggtggaattaactatgaatttaaaggaactaaagattcttatggattacataaaaaaagaacatataaagtatatagttcgaataatcgagacgaatggcaaaaatataatcaaactattgaagagcgtaaaagaaaaaaagaaatagaagctaaattaagatcatacaaacattatgtaaaaaaagctggtactaagagaaagtataatctatggccagagatcataattgatgtattttactatcataaaaagaatactatttcaaaatatgatttatttttgcttaaagaagctcattattgtaattcaaaaaaatgtattgttacaaaaatcaacaatggtaaagtatccattagatgtaaggctcgaaatagaattccatacactaagtttatttctctttacaataatgcaaataaactttcatatgaggtttagggtctatttttaataaataacccttaaagaatattgatatatcaagcccctatattctattatcagaatataggggttattattttataattaggataaatagcccctaaaataatgatgcaattgtgacgaacaaaatgtaacattgcaattgacaatatatttgagactattgctttacttactatccctatgtatcgcaataatgataatgaattttaggacaggagtaaattgacaatggagtttgcaaagcaattaaaaaagttacgaacagataaaggtttatcacaagaagatatcgcacaaaagattcatgtgacaagacaagctgtttcacgatgggaggctggttcctctgttcctgacttagaagcagccgttcagttggcagctttctttgacgtaagtcttgactggctagtattagacaagcaaccagccgataatgttacaaatcaagatatattaaatgcagtcaacgagctaagagacgacatcgatgatctaagtgatgatattgatgatttagatgatggcggtgttggttttagtgataatagaaaatcatttggtagttttctcgaggataattggtttctaattatagttatgtgtgtccttgtatacatgggattccatggaggtatcagctcctggaacggtaaatttttctaataaaaggagagtagcatgaaacaacacgttctacccatcaaagacaccaacattctacgcgaagtccaggacaccttacttaataatttccgctatggtcgccgaaactataccatcttccaagtcggcaaggcaacattgcttcgagtgagtgatgtattagcgctgagacgcaacgaaatcttcgctgatgatgaactatcaagaaaaatgcgtatattcgcgataaaaagactaaaaagcccaatattttgtatctaaaaccggttaaacaggatttactagattattatgcctggcttcaagaaaatgatattcaatccgaatggctttttccatcaaccacgcaccaagaccggtacttatcggatttacgtaatcccttgtcacagtaaaaatacagctattataaaatggtataataaaaaagtgcactggcgaccaccaatgcacaagtatacgttgtttggagctgattccttttggagacgttctttcacgcgcttagctggtggtgtatggcagtacaccagaataagagcgattttgctaaacttatcagcccaactattgaatataatatttcattagacagctatattatagcatgagttagcaactttatcgaccgtctggcttaatgtcaggcggtttttaattttctatataccttactaatggattaatcatatttattggacatggaagcaacaatgtacttctatgtctatttatttttatcatatataattgacactaaatttaagtaatgataaaatctctaatatatatgtcatatatatgtgtcataaggaggggaccaaatatttgaaccgtgttaaacaatttcgaaaagatcaaggattatcccagttaaagctagctcaaaaaattggagtagctcgtcaaactatcaacttaattgaaaataataagtataacccctcgttagaactttgtattaatttagctaaagcattaaatactgatcttaattcactattttgggaggaacatacggatgaaagaaacaattagcaccaaaatcattaagtggttttacggtattcatggaccattagatgaatatcgccgcaatgaactcaatcgaatcggtaataatattgccatatttttattatcaataaatctattattaagttttattgctagccttttaatgcttagtactaataattctgaacttactcttgatatcgtagtaagcgtcctactattaactgttttcgcttctttaggctatattctatatgaaactaaacgacatcatttaacagaaattgatgttgaagccaaacaggagagcaagactaaacaaaaatttattaaaagagcaattggcttaggaatttattttgcaattgtaatgtacggattaacaatccttatcgattggttacctaacaaaggagccttaattccattacttacagaaccttctacaattagtagtgttattgtcagtggccttatctacggactattaatgggtacttgggaaatacatcaaattaaaagcgatcctaatgacaaaaaagtaactcaaaatcacttacatcaaaaatattggttagttttatttattattatcgttattactagccttctattaatacataagtaattatatttccaaaaaatagaggcagtagttcgtgcatatgctgaagaaaaagaaattattttagacactgcaaaaacctttgataatactgatgacgcaatgagggagcttttcaaggacaaataataattgaaaaattagttttggccatcaatttcaacttgatattgattttgactaacacatttctcgatttcattttagttgttttctcaattttaaatacttatcaattgagcgccctaattcaaacacagagcctataaacaaaaaattagcaattgcgtttaaccagctccacggaatcatatttcttaaacaaaatccagcaattgttagtattatcaaagatgaataaatgcaaaaatcgcttctaagctcttttatttccttttgaagcttatcattagatttcgtcataatagttcctttctcggaaagaataattgtatctagtcataataccatatgccaatgtagatactttaacaatatctccttaatttattaggaaggaaaaacttgattggattgattttagttacagaaaaacaacctaagattagtttctagccttttctgctatacgccgtagccacagcgatttctcaagtatagaaaatttttattccaataattttctattcaaattattacagcaatttaacaattatgtaacaaccgccacccttaagatatttttcatatcttcttcacaatatcatcatatagtaaaagagtgcacaattagttgcatacataaaagaaaaacaaacaataattcaggagtgaataattatcgctaagaaaaaaacaatgtcaaaagtccttgctgctgccttaggtgctgctggtgcattagctgttgctaacactgtaagtgctgacacacaagttcaagtacaatcaggagatacagtatggggatttgctcaacaatacgctactactgttgattcaatttctactgctaaccaattagctgaccctaacgtaatttacgttggtcaacaattagttatcccatcttctgctatcagtgctgcttctgctgccgcaacagttgctgcacctactgcaactgataacgctactgctagtcaagcagccgttgaaactactgaaacaaccgctgcatcaactacaccagctgtttctgccacaaacgcaagcaacgtagccgaccaggcacaaccaacaacagtcgtatctactgcttctgataacaacactactgctcaagttagtgccgtatcccaagttccagcccaagtaagtgctgcttctgctactattagcgttgctcaaattagtgctgcaaatactaacaacaacgttactactttaacaacaactactaacactgcagctccaacacaaactacatacgctgccactgaagcagttgctactccacaaagcaacactactgttcaaagtactgctgctgtaaccgctactccagcaacttcaactgctgctggccaaggtaatggttctactgctaatgcggttgccgttgctcaagcacaaattggtactccatatgtttggggtggtaaccaaccaggcggatttgactgctcaggattagttcaatatgcatatggtcttggttcgaactaccggactacttaccaacaaactaacctcggtgcccaccacagtgatatccaaaacgctcaaagtggtgacctttacttctggggcccagatagtgctccttaccacgttgcaatcgctactggtaatggtggttacatccaagctcctacaccaggtcaaaacgttcaaactggtaacatcaactactacactcctagtttctacatcagcatgaactaagatacgagtagtataatcattgagtaagatagaagattttcttctaccttactcttttttcttagcaaattttaataattatattgacagctttattatcattggttatacttaacaacaattaattaagtagggagtaagtataatgaacgtatatcaaactatcaacgttaatactcgttggcaaagccggtaattcaggttgtttcgtcatggatgcgacctgaagaacagattgcatctgtgccggctgagtttgatgttcatttcagtccgcatggatccacatgcggacttttattttgcctttcaaaaagcgagggtccgtcatgtgggctctcgttttttattattttgtgaggtgagattttagatgaaaagaatgtatagtttaattgcaattattatcgctttcctttgtttcgcattctttagagaaaacaatggattcgtaactaagcaacgaattccaaaagttggtgtgttaaccttgatgcatcacccagcgttagatgaaatttataaaggatatgttgatgaattagcaaaggaaggttaccacaacggtaagaatatcaagattgagtatcaaaatgcgaacggtgaccaaagtaatcttaaaacaatggcttcaaaactcgttgatgataactcaactgttctttttggaattacgactcctgctgctcaagcattagctaattctactaccaaaacaccaattgtacttggtgctgttaccgatccaaaaacagctggactagttaaaaataatcagcatccgggtggcaatattactggagtatctgaccaagcaccaattcgcgagcagctcaatttgatcaagcaattcatgccgcgaatgaaaacactgggggtcatctacacttcaagtgatgcttcagcagtagccggttatcaccaaatcaagcgtgaatgtcgtaagatgaatattaacttgaaggcctattcaattgccaacagtaatgacttaaaccaagtttccgaacaaatgcttagcaaggttgatgcagtaattgtaccaacagataataccatcgctggagcaatgcaaactttagttaagaatgccgatgctgctagcaaaccagtcttcccggcaactgacacaatggttaagcaaggtggcgttgcaacttacagtgttaaccaacgtgctttaggtgtccaaggtgcaaagatgacggttgcaatcctcaaaggcaagtcaaaaccagctgatactccgattgagtacatgaagcatgggactcctgttctcaacattaagcaggcccgaaaacttaacttacaaattcccgctcaatttgaaaaggatgcagaaacgaaaggagaggtttacaaatgaatctaatcgtatcgtcaatcggtcaaggactattatgggctttacttggtcttggcctttacctgacttttagaattcttgattttgctgatatgactgttgaaggaactttccctcttggggccgccagtgctgttgctgcaatcacacatggcattaatccctttctggcaactttaattgcaattggtgctggaatgctcgccggtttgatcactggattgctctacactaaaggaaaaattcccagtttattagccggaattctaactatgaccgccgcctactccgttaacctccgcattatgggtaaatcaaacgtttcgttgcttggtcaaaagactctctttagcggtgaattcatgcgaagtctgccccaatactttgatagtgtcttcttgggaatagttacgattgcgattattaccgtaatcctggtcttcttcctttcaactgactatgggcaagcttttattgcaactggtgataatcctgtgatggcaaaatcattcgggattcatactgacacaatggtcatcatcggtctaatggtatcaaatgggatcgttggactttgtggtgcgttgattgctcaaaataatggatacgctgatattaatatggggattggaacgattgttatcgcccttgcttcaatcattattggtgaagtagcctttggtgaattaacacttaaccagcgacttgtcgccgttactcttggtagtatcatttaccgaatcatcttacttgctgtgctacaacttggtttctccgccaacgacctcaaccttatctcctcagttgtccttgcaatctgcatgatgttgccacaacttgaagaacgcattcaccttaaaaagccaattttgaaaggagtccggcctcatgaataaacctattttggaattacaaggtgtcaaaaccattgttaataagggcacatcgagtgaaacaactattcttaaaggcttaaaccttaaaattaatgagggagacttcattacgatcgttggaacgaatggtgctggtaaatcgaccctttttaatgtcatcggcggaaacctgcacgctgacgaaggaaaaattttgcataatggacaagatattaccaatacaacagaagaacagcgaacagctttcttatcccgtgtttttcaggatccaaaactggggacggctgcacgaatgaccgttgctgaaaacatgctattagcaactaaacgtggtgaacgtcgccatcttattccccggaagctcaaaagtaatatggaccgtttcaccaagctagctgcaacaatgaataatggtcttgagaatcgcatgaatacagctactggcgccctttcgggggacaacggcaagcattaagctttttaatggcaacaatcaaacgacctgacattattttgttggatgaacacactgctgctcttgatcctcatacaagcttaaatctattacacgctactaatgaacggatcactaaagatcatttaactgccttaatgattacccataaccttgaagatgccttagagtatggaaatcgtctaatcgtgcttaaagatggtgaaatcaaagcagattttaatgcagagcaacgaaaatctcttacccctgagaaactttatacttattttgaaggatagtttgactatatatcaaattcgatatattaagtatatcgaatttgatatataggagacttaattatgaattggtggattatttttatcacatttcttgccgtaaacctcgatttctttttcatcttaatctttttactcgaaaggtataaccttcgtgatgtaatcattggctatcttggtgcccttcttgttctggttaccatcagctttttactaggaaaaactctcgccattttcctccctgaatggattttaggaatactagggatcctccctatttacatggctctgcatgacaacgatgaagacccaactcatgcagaaaagcacggcccaattattaccaccttaataacctatctggcagtttgcgctggttgtaacctctcaattttcttaccaattttaacgaatcttaccttccagcaatttactcaggcacttctttttatcgcagtcctttcaattgcgatcgtgattctcattaagggaattggtaatattccactaattaagcaagcaatgcaacgttatagtgaaaccttaatgaaagttatttatatcggtgttggttgttatgttttttgggatagtggattaattacccaccttattcaccttctttagtttggtataataattactaaaccgattaaaaggaggagcagcaaccattgtcttcaacccaagcctttattgatgaagctgctaaaatctataaagttttaagtaatagtacgcgcttaaatatcttatattatctccggcactataacggtgaaacggatgttaaaacaatcgttaatgaccttcaccttgcgcaaccgatcgtctcaaagcaactcggtattttgtatcgttaccagttagtcagtcgccataaagaagggacccgcgtttactatgctttagatgatcctcatgttattgaaatgattgatgacatgctaaaacacgttaaacatgaaattaagggtgaacctcatccccgaaatttatataaataaagagtgaacaggaaacaatcatcaaaagggtattctctattcactctttttttgttgttgattatttttcgctcttgtggataaaagaattgaattaataaaataatcagtctttcactttgtattctgagtagcgtaaaatgattagcagattgtcaaaaggagactcaaaatggacgaattatttgaacattcttcaatcaaacgcgcatactttacacttgcactgccggtcgtattgagcatggcagtaactttgatttataacatggttgacacctttttcgtcgccaaaactggtaaccctgatttagttgcaggagtttctcagggagccccgattttcactttaatgattgccctaggtgacatttttgggcttggcggtagctcagttatttcccgcttatttggtgaacaccgtgataaattagcacgctttgtcagcggttattgcttctatgcaccaattatttgtgggatcatcgttacttcaataatgattatctttcaaacaccaattttacatttattaggtgcctcgccagctacttggcaatatgcacgagaatattacttagtgattgcttggggcgcggttttcattatctttggactttcaccaactaatattttgcgaacagaaggtctagccattcagtcgatgatcgctagtatggtggggaccggaattaatatcgttttaaatccaatttttatttttacatgtggactcggcgcagctggttcagcgttggctactgtaacaagtactgttattggcgatattttaatgatttattatttgcgaacaaagagtaaaaagttgacgacttcaattcatgaaacgaaaatcggctggaagcttcaatttgaaatctacgctatcggaatcccggcctcggtcactaacatcatggcaacgtttgcggttgcgttaactaatcgttacttgattgtttatggtgcggatagtgtagctgccatgggaattgcgatgaaagcaaatatgatcatcaatatggtaatagttggttttgcatttggcgcgcaacccttgatcggatacgtatacggcgctaaagatgagcaacggtttaataaagttgttaaatttgacattcaagttgttgctagtcttacctttatgctcactattattcttttcattttcgctccccaggttattcgcattttcatgagtgatccccaaatagtaaaagaaggtgccttgatgcttcgctggctgtcagtttcgactactcttgctggtatcattctcgtttttacaaccatgttccaatcaatgggaaaagcaacgcctgcattttggctctcattctgtcgtcaggggttgattttcggggtagtgattagtatttccgcaaaattatttggttatactggaatcattgctgctcaggctatttccgattgtttaacctttatcctggcacttattttcttttattgctatcgtccgcgttttaaataaaatagatttagacatacaaaaaaaggcctctcccgtttaaatttttcaaacgttagaagcctcttattagtttattcggttatttttcgttcaaagtaatgagccagtttagcctctggataatatccagttaccttttctttcgcctgtccatccttaaaaaggaccagacttgggacgctcattactttataccgttgtgcaatttcttgatttccatcaacattcatccgcacaaacttgattttatcaccgtattgcttttctagattttgcatagctggttccatcattttacatggaccacaccatggtgcccaaaaatcaacaaccgtcattgagccttgaacatccttatcaaaggtctcagctgttgcatcaattgccattttattctaccttctttttctgtgatctacgtataaagtgaataataatcgttaccgcaaaaacaagcaagataaaactaccgaaaatccctgatggaatctcgatgtcaattgcaggaatcgttaagaaaagtttaatagcaatcacaaagattaagatatatgccatcggttctaactcaggaactttgcgcatcagtttcataataacttcagcaattcctcgcatacatgcaatcccaatcagaccaccgattaaaacaataaccggattattagagacagctaatgacgccaaaacagaatcaatggagaaaataatatccataaattcgatctgtaaaacaactgtccaaaaaagctttcgtccagttaaatgcgttttaccttcacgggtctttcgcattgctcgcttaccaaagaacttattatgaaagtaacgatagacaaggtaaattaagtaagcagctccaataactttgatttcccaaaagttaatgagatatactccgattccaataattaagaatcggaaaatgtaagaaccccaaataccatagaaaagtgattcttcttgttcttttaacgttggtaatacacgtgtctgagccgctaacacaacagcattatcaactgacagtaaacattcaatcataaccaacgaaaagatgattaaccaatcctgccctgatgtaacgactgttgcccagttatgtggatcaaaaaatggtccatacaacttctctaaaagtgacaattaatgtcctcccttaatttaaatttgctttttagctaagttatattttaccaaataattttcaaaatacgacggtaatggcgcactaatatttaaagatttcattacgaagggtaatatgagtttttgcgctacaccatgaagcagcatcccctctgttgataaaggattataaagcggatcgccaacaatcggatgaccgctatgtgccaaatgaaccctgagttggtgtgtacggccagtcactaaatgaagtctcaccaaggaacgttcgtgattacttgccagtgtttcataataggtcaaggccggctgcgcgttttgtccgtttacttgatgaagatggggattcactggattacgcccaattgcccaatcgaactttccactctgagccatcttaccctccactaacgccaaatattgtcggtgaatttgcccatcactaattaatcggttaaggattgggacaacaattggattcttagcaacaattactgctccactcgtttgtaaatctatccgatgaaccatataagcattattttgactatgcgctaaatagcctgcaacatcgttcattaacgttcctgtttcaccatggtaattagggtgagttttttgtccccgcggtttatttactactaacaaatcgcgattctcatagaggacctctaagtgtgattgtgaagacggaatataatcatttgcggcaggggtccgaatttcatcaccacaaaatagcaactgaatattatcatttcttcccaccagttcattcattgaccgatattcaccattaacaagcactgtccgcctaattcgtaaatagtggattagacgattaggaagcagccattgatcatgcagtaatttgcgtaatggttttgtcacctggtcatcagctaacttttcactaatttgccaccgatatttcatcttactcacctctctttcgcctaaattctgataagattattttactgtatttcccagtaaatatttataatatttttaagccggtttacttttatccgataatagcgttgaatagagtatgagtaattttaaggggatgggtactgatgttaacaacagaacaaattaatgatcatagtaaatggataagtatattcgaacctctcccccatgagcgattagatttaattgaaaaatatgaggttactcaagaattacttgattatgcaattgacccttacgaaaaagcccgggttgaaattgatccagatgcaggagttacattattaattttcgatgtctatgtaccaactcatgctgtgactgctccacagactgcaccaattggcatcatgctcaccgctaataatatcattacttttacaaatgcaaaaactaactttgtaaatggaatcatcgctaatcagctacaattattaaagaaacacggggaaaatgacgacaaattaaacttagtgttcccagttctttatcgcctttcgactgattattttggtccccttcgtcgtgcagatcaacagcgacaagaaattcaacgaaatcttcaacgacgaacgggccgccaagccattactcaatttatggaaattgaaactggcctagtttatattcttacctcgctcaaagggaatgtttccctacttgaagaatttaaacgccgctttggtaaccacattactactaagcaatataatgatcttgacgatgtaattgtcgaagcacagcaagggctagaaatggcacagatgacttcagatgtttctgcccgtgtctctaatgcttatagcaaggttcttgatagtgatctaaaccaaacgatgaaatacctaaccatttattcaattgttctctcaatcccaacaattgtatctggcttttacggtgaaaacgtcaaactaccccttgcgaacgggacctattcatgggtttttacaattttcattactattgtcttaatgttggcatgtgtcatctttcttattaatcgtcattggtggaaataaaaatcggaagctgagaacttttttctcaagcttccgattttttataagttatcgccacgttcaaattgaaatttagaattcaacaacgcttcatgtaaaagctggttaatcaatttatgtgtttcattcagaacatgattagcggttttcatattttgttcagttaggtagttaattaaattagctgaattttgaatctgggctgtttttgtaattgtgtctactcgtcctacgccatagctttgacaccgatcacggaaatcatttacctcattgataaattcatgatagtgtggttctacaatcacttctaacaatttatttaaccaataagcactcttatccggctgcgcatcatctgtcgcatacttatattttgccggagtatcactaatatttgtaaagaacggaacataagggctatagcaataaaagccaaaattaatccattgaatagcagcatattgtgccggtacgtcattccgaatttgcaaaatacatgaactttgattacgatcaagtgcaattgaacggaattttcgctgttcctccggtgttccagacgcataggttcccattggatcataaggagtgccattataatgcgatgagaggaaatactctacatcctcaacagcaattttcttttctgcatgttgaataaacggaattttttggctagtaggctcctgttttaaagatggggtaaagagtttttgaccataccaagaacgaggtgtgttgtagtaagcatccgcctcatcttgtgtgccaaaaatattccggaaattaaacgttcgtgaattagggtttaaatgatatttttctacaaaatctttaatttgcggcgcatacataaagctatcgtgatcattaaagtcgacttcttcaatgcacataatatttggtgcaattgcataagcatcatcaggaatccgctgggcaacccattgatggccaccaccggtctcaaaataccaaacttcatccttatcgctaaaggcaattccattactctcaccggtaccgtatttttcaattagggaaccaagacgttgaactccttcgcgggcggacttaataaatggtaggacgagataaaccattgaatcttcattaatcccgttttctactaacggatcatgaccaagcaccctggcatttgtcatctcggtttctgtcgcgctcatcgcaacattatattcattaatgccttgttcatcccagcgtccttcatcaggcatgccattgggagttgccgtataacggcatccctgtcccttcatctcaacagttaacccattatattttgaaacataatgttcaccggtgtaatccttggcaggaaatactttgaatatcttaggattgactccatcttctgcatcctcatcacgtgcaataattgttgaaccatcaatcgtcgcattctttccaacaagcattgccgtacaactactcattagcttttgcatagtatacgcttccttccacagtagttactgtaccttctaataataccactatctggaattaactggattataaagaaaaagctgaacgttaatcacacaagccaatctaaaatatcattaataccgaacaaaccattgaaaatgttcggtattagtgctaggataactacatcaaataaatagcctatataataccgaaatatggtcggttagtctctacctaaagccgtaaactttagactataagcacttcttaaaaactgacactgtctgtttttaactttaagcttttaaaaatcggtagagaggctgaattttcagtctcttatttttatttaggcgtgttaatttttggggaggtatattttgaaagaacctgtttcatctattcaagcacctagtcgtcacactaaaatcgatttcactcgtcaatggcaaaattttgtccttggtttccagcacttacttgcaatgtattctggggacgttcttgttccgctattaattggacattacttacatttctccacgcttcaaatgacttatctagtctcaatcgatattttcatgtgtggtgtcgcaaccctcttacaattaaagcgaacaccattaactggaatcggcttgcctgttgtcctcggttgcgcagttcaagctgttactcccctcgaaacaattggtggaaagctaggaatcacttatatgtatggggccattattgcagccgggatctttgttttcctaattgctggcttttttgcccgcttaaaaaagttttttccaccggtcgttactggatctttaataactattattggatttacccttgttccagtaggtttccaagacctaggaggaggtacgccaactgctgcttcatttggtgatcccgctaacctccttatcggctttctaacaattgccatcattctgttattcaatgcctttgctcgtggctttatgaaatcaatcgccattttactaggaattttaatttcttctttcattgcaggcgcattaggctttgtctctcttaaaccggttagtgaagctgcttggttccacgctccgcaattattcttctttggcgttccacgttttgatatgagtgccatgatcacaatgattcttgtttcgctcacgacaatgattgagtcaaccggtgttttctttgcccttagcgacattactggccgtcaattaacaaccaacgacttagaacgtggataccgcgctgaagggattgctgcaattttaggcggactttttaataccttcccttattctactttctctgaaaatgtgggtgttcttaaaatgtctggagtgaaaagtcgtcaacccgtttactatgccgcctttttactcttattgcttggtcttttacctaaagtcggcgctctcgcaacggttattccagaacctgtccttggtggtgcaatgattgtgatgtttgggatggtcggtgttcaaggagttcaaattctccataaagttgatttctctaacaatgccaaccttcttactgcatctgtttcaattggactaggattagggattaccatgtatccgcaactgttccagcatatgccaactgaatttcaaatcatcctgggtaacgggattgtcgtcaccagtctttcagccgttcttcttaatctgttatttaatcaccggtgggctaatcataattaattctcattcttttttaatttagttgttgacattcaaatctcagcacgatattataatttcaacaattatcgtttcagtagaaccttcgttgggcgtaagagagccggtggtgaggtgcgaaccggtcaggcgaagtgtttcgaattatcacgtgatctgaattgtccggccatattcagtgccgttaccacctgatatgagtgcgcataaaatcaagatgcgtaggtgggtggtaccgcgattaaaataatcgtcccgttgatacttttatcaacgggacttttttatttcttttctaaggaggaacaacgatgaagagtattcgtttcaaagaggccgcaaccctcttacttatcatgctaataattttagggactgccgtgattaggtttggcttgtcaccacagatccccgtcctatttgtcattgctttacttattttttgggttaagcttcgtggtgctagttgggacgagattcataagggtatccaagaaggaatcggtaccgcaatcatccccatctttatctttatccttattggcgcattaatcgctgtttggattcaagctggagtcatccctacaattatgattgtcggcttcaaactgattagcagtcaattttttgttccatcaacatttattgtctgctctttagtcggtctatccattggtagtggttttacaactatttcgacaatcggaattgccttatttggaatgggagttgcgcttaatgctaatcctgcgctggtagcgggtgcgatcatttcgggagccgtttttggtgataaaatgtcgccgctctctgattcaactaatcttgcctctgcaattgcaggtagtgaccttttcgcccatattaagaatatgatgtggtcaacgattccttcttttatcgtttcgctaattctattctggttctttggtaattccagttctcatatcagcaccggtaagatcgcccacacaatggctatccttaatcaacaatttatgatttcatggtgggccctactaccaatcgccttaatgtttatctgtgcatggcgtcatattccagctattccaaccttatttatcaatatcatcgttacagtagtcatgatctccttccaaaatccaggaatctctcttcaatccctcgctaaattaattagtgatggttttgttgctcataccagcgatgcaactgttaatacattgcttactcgtggtgggattagcaacatgatgggaacagtttccctgatcattgttaccctttcactgggaggaattttgatgaagtttaacattgttcagtcagcaatgaagccactcgttgatcatcttcacaagcctggcagtcttattactgttaccattctctcaggtattggcattaatctttttgttggggagcaatacctttccgttattcttccaggtaaggcatttaagggtgcatttgataaaatgggtctttcacctttagctcttagtcgtgtccttgaagatggcggaagtgttattaactacttaatcccatggggagttgccggctcattcgtcgcctcaacccttggtgtaccagtccttcacttcctaccattcgctttctttagtctgttttcaccagtcttctcaattttaagtggagttacggggattggtttgaagtggcaaaaaggaaagcaacacaatactacaaatgaaaatcaaataaaggaagcttaaaaaaaatctgggtttgagagtttctcttacccagacttttttattatcctgcaattaatacttctgttaccaataatccaccaccaaagattaaaacaaagacaactaccggccacacgaaccgcagccaatgagaatatcgcatatcaagcatttgcaaagttgccattactaatccagtcggtactaagaataacattgcatattgcccaaattgatatgcagtaacaaccgtatatcgtggaatatgaaccgtatcagctagtggagctaaaattggcattgctagcactgctaaaccagatgatgatggaacgataaagcctaagacaaagaataccaacatcatcacaataatgaaaaatgatccgttcatatgcgcaaccatttttgaagaagcatagagaattgtatcagaaatatagccatcattaagcactttattaattccccgtgccaaaccaataattaatgacacaccgactaagctagctgctccatcagaaaaagctgttgtggtcttatattcgcctaaaccttcttggtgcccgaaacatgttaaaaacataataataatatcaattgttaagaaagctgatgccatattaggaaaggcccatcctttggccattactccccaaatcataattgggaaagcacaagcaaataaaattaaaataattttcttttttaaagtaaaccgctgatctttttcttcgctagtagtcattccccacatttgatcaaatttgtcccggtcatcataggaataggagaactgtggattctgttgtactttgcgtgcataccaatgaaagtaaaataataaacaagtaactgcaataaccaagccaaaaattcgtcctgccattccttgcgtaaaagttgtcccagcagcatttgacgcaattacaactgaaaacggattaattactgaaaatgttgttccaagcgaacttgctaagaaaatagccccaacacaaacaattgaatcataacccatcgcaataaaaactggggctaagattggataaaaggcacccgcttcttcttcaatcccacatagggttccgccaagtgctagtaaaactgtcacgaggaacactaaaataaattctttccccttagttttggtagatagcgcggctagcccagattcaaaggctccacttgctttaacaacaccaatcaaaccacctaagactaagataaaaatcataatatcaactgattctatcgtaccatcgaccatactagagaaaatatcgctgaccgaagcaggatgctgttcaagccgcttataagttcccgatactgaaattggcttattgattgcaccagatttaaactggtcgacatcaatctgaatgtgcaatttatctaatgttgcctgtgttgccggataactaattttttctccagttggttgtgttacttggagatgatcattgacatatgctaacttagaataacttcccgctggaacaatccaagtaagcattactgcgatcactgtcagaaagaataaaattgtaaacgcgcctggcattttcagtttgaaccgatgtcttttctctgctgttgcttctcccatcttcctcactcctcaagtcttctttctcccttctgttaattttagcaagcgttttcttgtttcttgatataatcttttatttgttgtgctttaaccaaagtggttgaaaaattatcattcataatctgtctcctaatctactcggtttattacgattagccaaaagtcatccataagtttcactatttgaaattttttattatttatactaaaaatactccatgcattcaagcacagagtattcatctttacttattatattcaacaatttccatatcattatcggtcaacgttgcgcgcgtcaggcttccatttgctgggcgctctgtcacatcatactttccatgaccaaaccgttctactaaacttaaaacggtatttccatgacttacccataaaacatttgcattatcaggtaaatcagcattccgaattaattcaatacctttgttcattcgttgccagtactcttcattattttcggcatcatgaaatggatcagcatcctttaaccagtctttggcttgaccaatggaatatgcggttacaatttcacggaagttcttaaagccatgaggggcacccgcattgtaccaagcaagatccatatttgttccttcatatgatccataaaactcttcccgaaaataaggagcagtgactggatgagctacagaattagcattattaagatttaagattacttgtgctgtttccattgctcgggaaaggtcactacaaaacgcaccatcgaagtgaatgttttgtaacttctccccagctacctttgcatcttctttgcccttcatagttaatggcgaattactccaaccctgtaatttgttgtaaatgttgaagaaagtctgtccatgacgaacaagataaatattcaatttagtcataacgatccctccataatcttattgtaccgcttacaaatccttaagactatttaagtattaactttgagctttaaacataatttcttcatattctccacgtagactaaaaaatatagaaggaaggaattattatgaaacttagagacactagtcaaccaaatattgttgccgctaagattattaaagttactccgaaaaatgttaccgtaattactgaagaaggccacttactcaagattccattaactaaacaatatcgggaagataaaactttacgggcatcattggttgatatcttgaaagcaggaatatggattccagtaaataaaaagctaaaaaaattatttagttatgactggctttttgttcctgccttggtcccagcaaagaattaagtttcttcaatgatttccataaaaagaatgttttgtagtaatctatgataaaataattcttgatttgtcgaaattgcacttcgataatatagaacaaaccatattgattgcgaggaacattcctaatgaaaaaattaagcaaatttgtggatactaggattggttttttcaccctcctagttatccttttttggttaaagaccctgtttgcttactttactgactttaagcttggcgttacgggaatttttcaataccttattttaatttttaacccattagcgaccaccttttttatttacagtttagcattctactttaagcgttcgcggttcttctacccagttattatgggtctagatatcgcaaacaccctattactctatttaaacgtcatctattatcgtgaatttaccgattttatgacaattgctacgatgaccggttattcaaaagttaatcaaggtttaagtggtagttcacttgccctcactaactttcatgatgtcttttactggttagatatcgtcgtaattcttattttaatgctctgtaaagttatcaaatttgatccacgagcaattggaacgcggttagcatttgcttttagctccgttggccttgtcttatttgggattaatttatcttttgcagaaatgagtcgcccacaattactctgccggacatttgatcgttcctacattgtgaaatatcttgggattgatacttttactggttatgatttagtgaagtcgcaacatatcaataatatgcgacaaagtgctactaaacctgagctcctaaaagttaagaagttcactgataagcactacgctccggccaatccacaaatgtatggaattgcaaagggtcgtaacgtgattattattcaccttgaaagtttccaacaatttttaattaacaagaagatcaatgggcaagaagttaccccattccttaactcgctttataacggtaaggatgcctactcgtttgataatttcttccatcaagtcggtcaaggtaagaccagtgacgcggaaaaccttttagagactagtacatttggattgccacaaggatctttatttgccacactagggagtgacaatactttccaaggtgctcctgcgattcttaatcaacgcgccggttacacgagcgcagtcttccacggaaacgttgctagtttctggaaccgcaataatgtatacaagaatttaggctatcagtacttctttgatgctagttattacgatacttctggagacaaggctaccggatatggacttaaagataagttattattcaaaaactcgatcaagtatcttcaaagtttacagcaaccattctacgctaaatatattactgttactaaccacttcccttacacgcttgatgatgaggataaagatccaaacttccaaacaactaataccggggacagtaacgtcgataattacttcgtaacagctcattatcttgatcaatcaatccaagaattctttaactatctccaaaagactggtcttgataagaaatcaatcattatgatttatggtgatcattatgggatttcaaacagtgaaaatacttccttagcaagtgttcttgggaagagtgcagatgattggactgactttgataatgctcagctgcaacgtgtaccactaatgtttgtcattcctggtacgggtcacggaaaagtttatcatacctatggtggagaagttgatgttcttccaactctccttcacttattaggaattagcagtaaacgctatattcaatttggaaccgatctcttctccagcaagcataatcaagtggttgccttccgtaatcgggattttgttacgccaacttatacgagtgtgggcggaacaatttacaataataagactgggaaagaagctaaacttaccaagaagcagcaagagaaattaaagaaggatcaagattttgtaaatgaggaattaactctttctgattcattaaatgaaaagaatctcttgcggttctaccatccaaaagggtttaaaaacgttaacccagctgattataattattcaaatggtctaaaacgagcgcagcgaatcgagaagaagaaaggaattaaatcaacaagtatttactcagaaaacggtgaccgttcaactgtagatgactacagcactgacgcccctgagcaaagccactcttccactgattccaaccgtattaagatcactaacccagatgctaataataagtagtaagggtacaaaatagtatagtagggtctaggagagcactgtgttctgcctaggctctattttttaagtttaagctaatttcaatcagctaaattttctctccattaataaaagtgatattattaacttgtacacaaagaataatggagggatttttatggttgaagaatttggctcaccgtcgtcttacatccaaggcaaaggtgtcctttttgaaagtgataagtatcttaaaaactttggcacaaaaccgttattactggctggcgaaaccgtctataaaattgtaggtaagcgttttgaacaatatcttcaagaaagtggttatgatgttacccgtgttcaatttaatggggaatcatccactaacgaagtaaaccgggtcacagaaattggtaaagaaaataatgtaaccgtcgtttatggtcttggtgggggtaaaacagttgataccgccaaagcaattgccgacaatctccatctacccgttgtaattatgccaacgttggcttcaaatgatgcaccttgttcacgtctctcagtaatttatactgatgacggtggatttgaccattatcgtttctacaaccaaaatcctgacttggtcttagttgatacacaagttatcgctaatggtcctgttcggatgttaatttctggaattgctgatgctttagctactaatattgaagcacaagcagttgccaaagctaatagcgatacaatgcttggtgaaaaacaaacccttgttggaaatgcaatcgctcagaagtgtgaagaaacattatttaattactcacacctagctgtagctgatgcagaagcgcatgtcgttacaccagcattttctaatatcgttgaagcaaatacactaatgagcggtctcggttttgaaagtggtggtctatctggtgcccacgctattcatgatggcttaacaattttagaagagactcatgatttaacacacggtgaaaaggtcgcatacggtaccttaacacaattaatgttggaaggcgctgaccaggaacgttataacaagtacttccaatttattctttctttaggtctaccaactactcttgctgatctacatttagaaaatgtcactgatgaagaattactcaatgctggaaaagccgcctgttcagaacaagataccatggatcgtttaccatttaaggtaacaccagatgacgtggctcaagcattacgagcagttgatgcatatactaagcaatatttaaatagtcaccattgtcatcatagccagatgtaataaaagggagcgagacagaagtcacttgtgacttcgtttttcgacgcgaagctagcctctgggagccccccgcaagcaacaataggcctctgacgttcggtttccggacgttagaggccattgttgtactgcgtatttgctttttatgaaagtaacttaacttatgtcacagtccctttttttgttatttaccctataagaaattaattaatgctttatcaacttgagtattattatgaagttttgaatgttgagtatcttttcctgttatttttagaacacggtatgactttgcccgagcagccactagatacttaagtgacaatgaagatacattatcaacagtaccgtctgaatgattaccaacatcaccaataatattaagaacagctacttgacctttcggataagtttgccgtacttctgtcatttgacgatatgtggcgttcatttcatttggttttccgtctttatttaatttcattccaactggttgctggatagcagcaggtacctgtttaaaattcaatccagcaaaatgacctgcgatatcaacctgtttttgtaattgaggcatattctgatttttaccgttttgcaacatatagtaaataatcgaaatatttcccaggaaatgaccaaccatattaatcttagttatgcgatatcgtttctgtaatgcttttacaacatttgtcgcatattcgccatgcttattaaaatccaactgcctattattatcataattcacctcaacaattggattaatgacccctttatgcattgaaccatgaagagtaacttttccgttattagtaacatcagctcgcaggactatgctcgttaccccggcttttttagcagcatttaccatgtgttcttctgcatgataactactacctccaccacggaaaaatagtgttggcgttgttgattgcatatatttactatgtttttgctgacgccaaactgcaccaccaattattgccaagataacaattactatcactacaccaatcccaatatggctttttttcataattttcacccgcttttttatttacctagattataagcctaagaacaataatgcagtcaaaaattactttaatgtagaagacgttgccaaaagtttccccgtcgaacatcattagcactatatagagagtaagttaatggttcaccatcaagcgtttctaattgatcactcgttatccttaagttgccaacacgttcacctttccagataggtgcttctagttttttctttttatattgtgttccaattgtataattcgtttttgtatcgtaaggactccaaatagttacatgttgtggcgtgagtttcattgttttttcaacaccattagctactttacgtgttgttactgatgatggaacttttattttttgtaaatggtcctctgtcttaaggatcttatataaatcctgcgtagccttaaatcggttgtctttattgctcccttttgaatgtaaaataacagtaataatgcgatgtccttgatacttacctgtacttgtaaaacaagctcccgcactgtcagaagtccccgtcttcaagccatcaatcgttaccccttttacagcgtactgttctcccggtaacatcttattaagattttttgcagtcttaacttgatcttttgctatttgaaattttacttctttttgtgctgtaatttgcaaaagttcaggataatgttttacaaagtattgcgataaaatggcaacatcacgtgcactcatcgtattagcagcattattagggagatccgctaacttaaaacttttcatatctccattatctaatccaaccgaattcacaatgtttgtcttagtcattccaatttttttggctttttgcatcattttaagattaaattcatcggttccatccccggtagctgttgcaagtgcgacagtcgccccatccgctgactttacaagggctgcattgattaatgtccgaactgaataagattgaccagattttagtccgattgaagaataagcagcatcattagaaatagccgcaatttcaggagttatttttacttgagtatcccatgaaagttgcttttgttggatttcatcttctattaccaaaatagttaataattttgtaattgatgccacgggaagagccttatctacattttgcttatagataatttgccctgttgaagcatcagccatgatcgctgcagaagcatcaattcgattatttgctaacactgattgacttcctaccattagcatcatgaatagagataaaataaaaactgtcaactttttcataaaatctattctcctattttcttcaagtacggtaagataaacttaataataaataataaaggaattcattatgaataaagaacttaaatcgctgcttttcatctcaactggtctattccttatttttgttctaatttttaatctttatacatataatgctgctagttttattccccaagctagcaaaacaagtcaaattcttagtcaaaatcggcttcgtgctcctaatattcaccgttcctctgaaaattgggcataccctaagatcggtaacgctcctattgaattgatcgccatcaaacaagcaaaaaggattctagttatcaactcaaataagcgccaagttatttacattattcacgcacagattaatctaccagcacaaaaaaattctttccgcttacttcacgctcggggcagcaaatttatcatattaatggttcccagcaagccatcgctaagaattggttaggaattactaatgggaactacattgaaacccccgttacagatatgaataatcatcaggtctcacgaaatctacgaaaagcacccaaaattgaaaatactatccaggtgtcaatccccgatgctaaatggctgcaaactttacctgaaaacacacccttaatagttaaggaggactattaatatgatttcacgcctaaaacatggacggttttttaatcacttacttggaagtaatcttattttgctaattataattagcttttataatcttcttacatacttcatcccattaatcaaaatttcaatcattcaaataattttattctttctaataattgacctactcttgattatctttaagattttagcgctatacaattagccgacaatctcaatcttagtaccaactggcaaattcttttccatccattgagcgtctggcactgaaagccgaatacacccgtgagaaccctgtgtttttccaagcttagcagcttcttgttcattatattttccatctgctttagtcggaacactatggaacaagtattctccatgattcttccaagaaacgtagtaattagctccctctttcaacgattgattaaagaagctatctcctcgctcttgctgagcataaaatgttcctgtcggggtcacacttttcagtttaccagttttaggatcctttttataaattccacctgtgctatacattgtataaatgacttttgaaccatcatacaaatatgtccgattattttttaaatcaactttaatccaaaagtccttcactttattcaaatctggatacggaactgtttccgaggacttatgccaatcaattggggttcgcatatgactttcactattatcgattttcttttcttgtgttggtttttcttttacttgcgattcaactactgctttttggggatgggcattcgaagtagcacgtaattctggaccaattgcaattattgctactaataagcaaaatattccataaatccaatgcttcacttgtaagttcaaattaatttctcctttacagataattcaaaacatcactattataattatagggaattttttattcaatatactttaaaaaaggtgtacaaaatgcgggataatcttaaagtttcatacttaactgctatctttttctttattgttgctatcatttatgcaaatcttgcgtaataatcgtgaggattctactatgacatcatttttttcattcatatcaaatatttggtcgtataccatcaaccataaatggtcaaaggatattttacgagccaacatcctttttattcttttagttattgtttacgatctttttcacttttcattaaaaataattaattggcggatcttttttaaagtatttctgctattaaatatttgtttgttttttaagttccttttagatggtattgatcgctatttaagaacacggtaactttataaattctttattgagttatcaattttccgtgctaagataggaacgtaattatttattttcgatttgaggaaggtacaatgcattcatatattaaatactggatagcaggaataggagcattattaattataatgattgcggggatgactgttcaccagaaaaatcatttcaataaaaacgtaaccatcaataacattgccgtgggagggctaacagccaagcaagcttttgataaggtaaaggggacctcaggagcaaccaaggtatatgttgacaataagctagtttaccaaactaaatccatgaaggctaattttagcaataatgatgaacaaaaatttaatcaagcactgaaaaagcagtttacatttttcccatcacataaagcaacgaacttatcaataaagccagataactttgatcaagattcgtttaatattgcgaaaaacaaattaactaacgaggtacatcaactcaacacaagtcgtaaagctcccgttgatgcttacgcggtctaccaaaataagaaagtttctgtagttcctgcagttaagggtaataaatatgatttaccaaacgctgttaatcaactaaataatcaagccggaagtactaaaattaatattactttacataaggaacagccgattgctgcaaatagcaaaaccgttaagaacgaggaaaaacagttaaataagttaaaagggaagaaagttacttacctcgttcaaaatgaaaagtataacctcactaccaatcaaattattacccgggcaacctatcaaaacggcaagtatcatttcgacactacggccttaaataaacaagtaaagaaaatcaatgagaaacatgcaactcttgataagccatttaaatttagaactcattctggagcagaaattaccactacagctaatggttcctatggttggaaaattagcgagaaaaaagctggcaattcattaactaaagcaattatcgatggccgccaagaagttgatggcgagcacgatattgaaggaaaaggctataacactgctggactcggctacaatgttacatccaataatggtattggcgacacttatgctgaggtttcattagctgaccaacgagcttatttctacaaagatggtaaatgtgtccttgaaacagatatcgttagtgggactaataacgaaggcaacaaaacgccaaagggagtctggtatatcatgtaccaacaaagtccttccgttctccgtggacaaaacgatgacggatcaagttatgcaagtaaagttaattattggtcgccgtttactttaacgggatgtggcttccacgatgcaagttggcgtcacaattggtccaagactgcttacctaagcgatggttcgcacggctgtattaatatgcaaccaagcgtggctggccaagccttccatgatttaaaacaaaatgaacccgttattatttattaatactctagggagcgagacagaggtcacttgtgacttcgtttttcgacgcgaagctagcctctgggagcccccgccaagcaataataggcctctagcgttcggtttccggacgttagaggccattattgtactgcgtatttgctttttataaaagtaacttaacttatgtcacagtccctattattttaaaagaacgcctaaccggactgtggtgaaaaacttgcaagctaacttattttttattctcttaattaatatatacgtaaaaatttccctttgcacctcataattctaaaatagtggtacagtaaaaataaaccttaggaggcttagattatgactgataaaattgttacttcagaagaaatgcgacattacgattcttacaccattaatacaatcggtatcccttcccttgtgttaatggaacgagctgcattagccgttcgtgatgaaatcttgcatgcttttccaatcgcgctaaaagatgtggtagtagttgccggtagtggaaataatggcggggatggaatagccattgctcggttgctgcatcttgctggtgtccatgtaacaatcctcaatataggtaatcctaaacatgcgtctgctgaacaccaaacacaagaaaaaatcgcgcaatattatcaaattcccgaaacctctgatctcgctgtccttaataaggcaacattaattgtcgatgcaatgtttggaatcggaatcgatcgtgcagtaaaaggagcttataccgacgcaattaacgccattaataacactgatgcagttgtcgttgcagtagatatgccatcaggaattaatactgatactggagaggtaatggggactgccgtcagagctactacaaccgtaactttcgcctataataaagttggcttaaccaagaatgccggaaaagattacgcaggaaatattgtcgtcgcaaatgatatgggaacctatgcagtagactgattggaatattatttaccgagccgttttactattaatcgctgaatattaatattattataataagtaacgaacgtttcagtgaactaatttggaggtaaataatatgtcagaattaacaaccaaattatttatagacctaaatttcaagaataagttagccactggactcaaataaataatactgaccaattgattattggttgatggagctgtgatatctcttggtagaaggccttacgatagatatccattgacgaatgtccattaaacatagctcgtggatagtgattcatccaatcattagtcgctatgatctgagcactactatagttatttatagcttcacctttggtaatctccttgcggagaaaccggttattgatctcattggatccacgttcccaaggggaatacggatcagcatagaaaacatgatcgtgaacttgtgttaactcactaaattctgaaccgttgtcagaggttattgtcttaaagatgcgatagtaagcatctgtgcccattttctggcgtaaatttataaagaactgatttactgcatgcgcagttttaccagcaattttactcgtgatattaactcgtgaaaggcgatcagtcattactagtacaacactgtcattaccgtttttctgtccctgaactgtatctagttcccaatggccaatttcggaccgttggtccgcagtttgaggtcgttgagcaatattaggacctaagcaccttttagcttgcggatgagttcgatgatgcttacgtttaggcttttcaaagaggtctaaattggacgtacgaagcacaccctcattaatccattgatataaagttacaaccgactttgggatcagggtgccatcattcattaaatctcgagccttataaataaccgcttgtggggagtaatggtggtcgtcaaactcaccaagcattagctgatcagctaatcgtaaaaattgctttgaagaataatataagcgacgacgaccagaatggcggtgatgttcaagatatgtggcctgaccagcttcataactatagatgtagtaagaatattcgtaaatcttaccattagatttttgacgacgaagttggcggaccgtaccacggttgagctcgttattaattgtttgatgattaactcctaattggcgaccaattgcgcgattggaaagtccttgcgactttaaagtcgcaatcatcacacgttcttctttagtaagatgagcattctttttatgagtagtcaataaactagtagacatggtatcatttaagtgcgtcatttgacggacatcctttcatataggtttggttcacttaatatgatacctgatgtcacgccgaatggcgttttttatttaccaccaactgggtggctaacttcattctataatccaccaattatttatagatgttaaaaattttgaaaaataccaatcaatgttaaagtgccaagtacacattgaagaagaacgtcatggtgattattgcttaccgggttttcctgatcgtcacaatttccaccgccttctccggattttacgtaaacatgatgacggtttaactagcaaacaactaatttatgacttcgattaccggccaagtgacctcgaagatgctactaaagcattagtaacaaacaatttgtcaactactaccccaattaacgaggaagactacaaaattcaacttaacactgaaggtatcgaagttgctgataatctgctaaagcgccgtgacaaaattgctgaagctgcttaccacacattaagtgaaaatgaacaacgagaattagaccgtcttgtaaacaagctaatagaggattatgcaaaccgcgacgtaaattacaacgcccttggaaatatttgccgttaaaatataatatcctattcaaaaaaggcagaggctaagagaatttttttctatgatcccttagtttctgcctttttagtagcgacaagtcttattaagaaagtactttcccgctcactttcaatttagttattttaaatattctgctggatttgctacaaaatcgctaattttaatagttgttgcatccttagtagcagcattctttaattggaaagttccttcttcaacttcacgagcgccaaacactgcaaagtacttcgcattacgacggaaagcttctttgatctgcttaccaacttttaccccactgtaatctttgtcagccacaatcccttgctgacgaattttactgaggacttcaaatgccatttcatccccttgctgatctgcactagcaaagaagacatctagttggtcttgaggagcaaatgcaggattttcttcttggagtaagagcattaatcgttcaacacccattccgaagccaattccaccttcttcagggccaccaagttggctaatcaacccattataacggcctcctgcacaaacagtcgtgtacccaccaccaaatactggtgagtctgacataatttcaaaaatagtatggttatagtaatctagaccccgcaccatattggtatcaatttcaaaatcaattcctaatttatttaataaggcctgcacttcgtcaaagtaagcttgtgactcttcatcaagataatcaaggattgatggagcttctgcaacaatcttcttatcgccttcatctttactatcaagtacacgcaatggattcttatataaacgttcctgagagtctttactcaattcatcatagtgaggcttcaagtaattaattaatgcttcacggtaatcttcacgaacttttttatccccaagagtattaataaccaatttaacatttggcactccaaactttttaaagagcgccattgccattgaaataacttccacatcaatctgtggtgactcattgtttaatgcctcaaccccaatttggtggaattcacgttgccgccctgattgtggacgttcataccgaaacattggccccatgtaataaactttataaggtttaggatattctggaccatagagcttattttctacataagcccgtactactccagctgttccctcaggacgcaatgcaatatgacgatcacctttatcatgaaaatcgtacatttctttttcaacaatatctgaagtatcgcccacattccgtgaaaaaacatggtaatcttcaaacatcggtgttcgaattccgcgatatccaaactggttaaaaacttcgcgcgcattttgttctactttttcccaaatacttgtagttcctggtaagatatctgcagttccctttggcttttgataatccattaactgtgtttcccctttcgttacgtataaaaacaaaagccctctaagaccttaacagccttagagggcgatattcatcactgttccacctctatttcacagtaacctcacagtcactgcctcatggagttgcgttaactcctgatgataacggaatcaccggaacagactactaaaattcatcctttcagctagtagaggtggatcatgtctgctcccagctctcaactcaactggatctctgtcaattacacaggcactttgtttctacgtcaatgcttttataatacattagtgattttaccatagcttacagattttgggtatcatttatctaaattaagccgccgttgaactcggtgtaaataccataaataaagacagataataatcagagtaccggtcattagacaaaagactgaaataaataaaaattgataacttcctttttcaatgacaaatccaccgtacaatggaccaatcgcacgtccaaccgacatcataatattaagcaatccttggtaatgcccagcttcgtcgacattagtcagttgagcaatccaagcaggtaggccagcaaaactagtcatttcaccaattgttaagattacaaaatcaataacaaatgctgtcaaagtccgagcaaaaattaacaggaggaaagatagggcaaaaataaagattcccacaataatttgcgttgataaacgaacatagggacttaacttattaacaagtggttgtccgataataattagcaccccattcaatgtccataacatactataggcatagaatggaatccccatgtttgtcatatggactgccattacactttcccataaggaataacttaaatgaaccgtaatatagtttatgagaataaaccaaaccaagacgatccatcgcgaatgcaattggcgggaaacatgatagtgttcttggatctctgaattatttttaattgcatctacagccacattaaatgttaaaacaactactagcattaacaaggcataaaagattgttgctacagcaaaaactaccactacactaatcggtaaaagaacacccaccagcaacgttccaatcacaactccgatattaaaggccatataaatataattaaagacataacgggaagaatgatcactgaccaacgtcccataagaattaacaatcgtggcattgattccatccccaaagctgttaattgtaattaggacagcataccatggccaatcatgaataaagatcaataagaatattgctagtgttgagaggctaactcctaaaatagctgtttgatattgtttccaatggtcaaataaccaccctcccaaataatttcccatcatcatggcaatggacattattaacatcacaaagccagcagtcgtcagagtttggccaaggtaattatgaagatacatagttgtaagcggccataaaaaagctgcccctgtgttgtttaacagacttgcaagggcaacccattttaattttaccgtttgctgttccattttaacgttcagataccatatcagaggaaggtacacgtaaaagcgtataggttacagcactatgatttgcttttaaccctaaaccattaatagcagtatttttatactttacatccattaccgctgcaaaagcatggcctgttttggcatcctctttttccaattgctttttatcccatggcaaagcactcgcatctaaggtaactatccgcgatccatcagcaaccgatccataccgtgaatttgttgtatatttatcatttccagcccagtacgtatacgacacaattgggtgcttgccgcttttactacgcgtcgctaaaacataatagaaatcatctgacttatttcccatttgaagtggacgataagtgattgaagtctgtgtttgttgatgattattaatgtcaactggacggaaaaatgtgagatatgacatcccccgagccaacataacgagacaactaataagatcacataacgaatcactaaatttaatttaaatactttttttgtcttcgcaatcagcattaattgtttaacacggatatagtggattacataacaaaaaaaggcaattgcacatatccacgatagccatcctagccaattccaactcataattttcaatactccattctctaaattatttactatgattatcacacaaattgattcacttgtcgttaaatcttaataacaaacaaataaatttaataaaataactacaaggataagttcaaactgtgctaaactaatttttggtaacaaactgtgtcttgatttagaataagagataaggttagtattatttaataatatacctactaaggaggaatgttttcatggacaatttgagtgagcttgctcaaggattgattaactttgagcgcgaaaatgacttaaatgataatgaagttgctttcggcagtcatttatctgttgaacgaattcacgaaattaaatcatccaatactccagtaacttcagaagaagtcgaattgcttcaacggttcatgcaaagtaagtaacattaccattcataccattgtagcaaaatcaaagctaaatattttctaaagcagaactaataatatttctctgctctaatctaaaaaggacctagaagaaaacattactttcttctaggtcctttttctgcttattttggttgataaaattcaaccggaacaagtttagtttctatcttttcatgaggtgtttctattcgcttcattaaggtttcaattaattcttgtgccaacaatggaattggttggattactgttggaagataaggcgctacttttcgaattaattgcgagccatcataacctgtaataaaaaagtctttatttatttgctttcctgcttggtagtaaagattgctaatcgttaatgcttgaacatcattagaagccagcaccccatcataattaccaggaaacgtagcctcaagatccaaatgttgaatagctaaaggttcaaaatctcgtttctgtttattcaaaaaatcaagtgccccttgaatccgattgatggtaggtgaaacagatgtatcttcatccacaattaccgccaagtgttttacatcatgttctaccaaatacttcgctgctaattcacccccgtggtaactatcagctgcaacaattgggatattatcggcaagatatctgtcaaaagaaacaatgggagcagtaagttggtgatattcctctatccccagattatgagaacccgaaataatcccatctacttgatttgccatcaacatatttaagtattcatgctctatttccggattttgtgccgatgatgcaataattgttttataaccctttttaaataactcatgttcaagctcatttgctaattctgcaaaaaatggattaattaaattaggaaaaattaagccaacaaacttagatggtttcccttgcatcgcccgtgccaaggcatttggttggtaattcaactctcgcatcgccgcatggaccttatcaatcgtcttttgacttaaagaaccataattatttattactcttgaaacagtagttactgagacccccgctaattgagcaacatcttttaacttagcaaccattctaaaactccttgattaatttcgtttaagttattccattattatagctcaccacatttgaacaatcgacggttactttaaatataattttaatcgctattttcacaaaaatgtgttctattacatatgtttaatttatcatttatctaaaaatatttttcatttgataaaacatgttttgtgaagatgataattattgattttatgatattttctccccagttttaaaggatttcacttgttttttaccttcaaattaaattgacgctaaagagaattaatgctagtttataggtagttgaatctttagaacttcttaaactttttgacctttttgatattattttaatttatgaaataattaataagccacttttaggagtaatgtttaggaatttcaaatataacttaaggagtccctgccaatgaatcgtcaatctaataatgatccatcaacccattttaaaatgtacaaaagcggaaaaaaatgggtcttcgctggattaactgctgttaccttattaactgctagcggcgctgttgctcatgctgatgatgcttcagtttcttctgcagagcctgccgccgctactactgccaatacacaaaataatacaaatagtaccgctgattcttctgctgccactcaaagtacatcaaacagcgcctcaacaggaaatagtgctacttctaatgccagtcaaactgttgccagccaaaccgcagctgattcagctttagcacaatctgctgaagctaaacaagctgctcctgctgctccaaaggctgctagtgccgttgctacatcacaagagaactcaataacagatttaagcgccctccatttcagtaataacgcttcacaacaagcattcatccaaagtgttgctcctggtgcaatccaaggatggaatgaatacaaagttctcccttcaattacagttgctcaggctatcgttgaaagtggttggggccattcggccttatcaacccaggcccataacttatttggaattaagggttcctataatggaaattcagttgtaatgcgtacacgggaagtttatggtggccggagcgtttacgttaacgccaatttccggtcctacgctaacaactccgaatcagttactgatcatggtcgctttctcaacgtaaatagtcgttaccgtaacttacttggcgatactaactatgcatctgttgcaaataagcttcggcaagacggctatgctaccgatccaagctatgctagtaccttaattcgttttgttcagacatataacttaaatcagttagatgccgttgccctttctgggaaagttgttacgaataagcaaactgaaagtgctcaaactcccgaaactaatgtaactgtttcaaacactggatactacacggttagaggcggagacaccttatcacgcattgccggacagtttaatacaactgtaaataaactcgccaccttaaatgatatccacaatgttaaccgtatttatgttggtcaacggctcttggttcgtcaacctgctgaacaacaacagcaacaaacaacccctaagcgaactgaaaccaatactaccactaatagtaatacatacaccgttaaaagtggcgataccctttcaggaattgctggtaaatttaacaccacttatactcaattagctcagcttaatcatattagtaaccctaatgtgattcatgtagggcaagtattaacgcttcatcaaactacagctcaaaatactactaaccatcaagaaagccagcaaaataaacaagttactactagtgctaatggcacctacaccgttaaaagtggcgataccctttcacaaattgctgctcgttttaataccacaacatctgcattagcttcaactaaccatattagtaaccctaatttaattgaagttggtcaacaattacggattaacaatagtgctagtgctcaaaaaaccacttcacgccactccaatactaacaatggaaattacgtagtccaaagtggtgattcattatcaaagattgccgcttatcatggcttaaactggcgatcaattgcagctaaaaataacattcaaagtccatacacaatctttgttggacaacatttatcactttagtcaaataaccattaaattattatatgatataaagcaagaagtataagaaaatctatgcttcttgcttttttgttttaaaaaaattcttttctgttctagaataaaggtaggcagtttattattaatattcactaaattactattagggagtttatagaaagtatgtgatatttattgtggtagaccgttggacaacagatattccaaatgttaataaaatcagtcaattatttaaattactagggaatcctaaaagattacaattattatatttgctgattcaacattcaatgagcgtttcagaaattagtatgaagttgaactgggaacaatcgggggtttctcaccagctgcaactattgagaaaatataatttagttcaataacggcgagaggggaaaaccgttatctatcatttagaggatccgcaggtaatgaccttgatcgctgatgtattaagtcatgcagaaaaaatcatccaataatttagtgaatattctttgggatccccccattgaaataaaagaaaggcgtttagaactcatcctaagtcaaacttagacgatgacttctaaacgtcttttcgttagttaataaacttaatttctaatcgttcatcttccaaaactccttttacaatcaatgacttaccatcataaaactgatgcttatctaaccaaaatccaagatgggcgtgactataaaacttaaaactataccgcattgcattattcagtttactaacctgcaacacaccttgtgagccatcggaacaagtaatattttgtgattgattattattatgaacataaattgttgtcattcttctcacctccgtttttattatatctcaattttggactaccaaaaatatttttaagcaaaacaaaaaagcaacaacttcagctataggaaagttgttgcttttaaactaatctgcagctaatgcatcgattggattaaggtttgccgcccgacgtgcaggaagcaatgcggcaataaacgaaattacaatcgcaattacgattgcaaagattacatttccaacagtaatttgtacaatattatatttaatcaagccatataaagcgtggttaataataaccgttacaactgcaacaattagcagtgcgagaattgcggaaaacagtccaataaagacggattcagacgtaaataatcggcgaatatctttttttcgctcacctagggctctcaaaataccgatttcctttgtccgttccgaaactgacatgtacattgtcacaataatcattaatgcagacacaagtaatgaaattccagcaattgaagcaagaaccgtggaagcaagactaacataagtattaatggttttaaggattgacccgactgtaatcgctcctaatatccgtttgttattactaccacgaagattatcgatcttattcgccactccttgaacactgtcaagatttgttacattaacggttgcaaagttagcagcagtagaggcattcgctttttgaagcagcgcacgcatagtggaataagtaattgaagttccagcactcgcgccttctgtaatccctgccaccttgaagtttccagaaacgggaactggattattattggcatctatccatgtaaaggagagacggatagttttaccaaccatttgcttataatttttagcacttgataattggattgcttgttgctttgtaagaacgatttcaccattcttgggtttatgcccctgtttaattgaatcactagtaattgccttactcgaggtacttagtgaagtcccactttgcttttttccattataatcaagctgaaaggcgctcaccataattcccggctggacagacgacacattatcaagctttcgtaaccggtcaatattatggtcactaatcgtcattgattgaggattagccgccatcgtttgtcctaacgatgattgaatttgttcctgggtcatctttttaccagttgtgtttttaaatacggtaattgcctgcggattagcaagagaattaatctgattttgaatgtacccatttatcccattacctaaaccactaaacaagagtacggcaaagataccgattgcagttccaagcataattaacgaattacgccaaaagttataggtcaaatgtttaaaagccgttcggtagctcgccatcgccggtaaaactcgtggagtaatctctgttgggtcttctggaatcggataagcaggacgcaatctttcatcgccgtcaatttttccatcagctaaatgaacaattcgtgtcccattatccgctacttcctgggagtgagtaacagcgatcactagtttcccatcacgagcaatttcgtctaataatgctaatacttctttggtattctgtgcatctaaggctcctgtaggttcatcagcaataataatttgcgggtcacttgctaatgctcgggcaattgctacccgttgcttttgacctcctgacaaatggttcggatgcttttttacttgttcacttaaaccaaccttatctaagagttccaacgcgcgctttcgccggtcttccttagtcaacgttgtcatatccaacgcaaccaaaacattatccagcaccgtcaagtgagaaattaagttataggactgatagatataacccaccgtcgcgcgccgatagctatctagttgcttttcttttttatgatcgaggattttaccatttacgaggacttcaccttcaaagttacgatcaaggcccccaatgatattcattaaagtggactttccaccacctgattcaccaaggatggatacaaattctccccgatcaaactgtaagtcaattcccttaagaactgggaattcctctttgtcaagataatatgatttatatatgttttttaattctaaaaaagccattgcatcctcccctttactatttatttagtctgtttattatagcaaggttcgttatgaaaaaggtttttcgctcataattctttaacattatttatattattggtctggagaatttttacttaatgtaagtttcccatcagctaactcgtaaacattatctgcatattcacgcaaacgtaaatcatgggttacagcaatcactgcttttccttcctttttagccagatcttgaaataattgccccactgtctttactaaattactatctaaggccgctgttggttcatctgcaagaattatctcgggattggtataaagggcacgtgcaatcgctacccgctggttttgacctcctgacaattcagaaggatattgcttgagcagcttctttattgcaagcttttccaataattcatcaaaagcttctgatgagacgttcccattcttctttatgcgatcaacaagcttaaattgatccgccacatttagatagggtaataggttatacgactgaagaataaaaccaatcttctgtaagcgtagttcatcacgttttttagaagataatttctcaatatcaattccatcaattaatacttttcctgaagtaggtgtttgcaaaccgcccgcaatcgttagaaaggtactctttcctgatccagaaggtcctaaaattaaatttagttctcccgctttagcagaaaaactaacatccttaagaacatggacacggctaattccttcgccataatatttgttaacgtctactaacttcaattttgacataacatttgcctcctcaccttaatttaaggcctgtactggatcaatcttaataatcattcggactggtaataacgaaccaatcattccaagaactattaatcccactgccattaaactaattagtggccaattcataataactggtaccgacattggaatcgctacacttgtaataagggttaaaagaatcccgccaattactccacaaaccattaggaagattgattgagtaactgtcgcaataattagatgacgagcaggaattccttgagcgcgcataactgcataatgacttattttttgcatggtaagaatatataagaagaccgcaattacaattaacgaaattaccattaagaagccaatcataaaagtaaacgtattattttgcgctgaatatcccggtagcttattaatatattcgttaacagtgtagtgttggagatcagggtaggtatttttactaagcttattgtcagaaaagagtccgctagcaacggctgaactatttaatcctctcagttcccgccaaactggcaaactaccatatataacgggggcaacgctaaatttagcatcattaacaaagccaacaattttatatttctcattttgagaattgattgttactcgatcccctaaatgatacccctttttgcttaaactcttgtcaacaacaatttcgttatttcccttagcttgacggccacttgtaatcttaatcttttcccgggaaataaattggtcaggatctaaaccgataaattgagcactttctttacttgctcctttttctttaagaactactggtgcctgaccaacaagagcaacattcttttgatctttaccagatagttggtcacgagtaataattgattgtccaagattatcattactatttttatttagaaaaacagtttccgtaccccactctttaatggcggcatcattttcattttggagtcccaacatcatccccattaggaaaaacattaggtaactaattaaaacaatcatggcaacaattaatccataatgcagcttttcatgtttcatttcttttagtgctaaaaacatattataacctcctactgcaacaatgcagtcagtgccttggagagccgttcaattgcttcattttgtttatcaggttgaagaaggcaatccttaatcgtttcatgactcaaaaccattacactccattcttgagcactatgaatcttaatttgcggctgcgtattatcacgtaacaatccttcatttgtttgaaagtgcaaacgcataaaatcacggtacttacttccgttgatctcatcaacaaaagctttaatctgattaacataatcactcgcagctaaaatatggtttgcacgggtaattggtgtatgaatttctaaaattgccacttgataaagatactgatatgcctccgttaaatctgtaaaatatttataaaatgctcctctggcgattcctgcttgttttacaatccgtgcaacttgtgcacttgctaagctatgttgactaaattctgttagtaatgcattagtaataagttcttttttctgtagatttaaattttcaaatgttgtacttggcatcttaattcctccaccgcatcgtgacaccgtgtcactatgaatttattttatattatcgccaaagtgacaccatgtcaattactagataaaaaaagcgaggcgaaaaattttttgcctcgtttttaatatatttaaatttttatcttaatctagaattaagcttcttcgccgccaaccttaacaacagcttttgaaaccttacctaatttaccactaacaaagtcttcaacaccatcaaggtctaattcgtgtgagaagagtggtagtgggtcaacaacaccagaagaaagaagtgcaattgagtcttcaaaagtgtaagggttaatgaaggccccttgaattgtaagttgtttttggaatacatcgtaagtgtttactgagaacttgtcatcagggttaccaacaccaaacattaatacttgagcaccacgagctgcagctgcaagtgcttgttcttgagtagctggcaaaccaaccgcttcaacaacgatgtcatatgcatcagcaggaatttcttccttagtagtgttgatagtcttaacgccgaagtgcttccggttgttttccaacttttcatctgaacgaccagctaaagtaacttcgtgaataccacgagccttcaagatttgtgcaaataattgaccttcaaaaccatcacctaatactaaagccttttggtatgggtgagtttcaagtaagtcaacaccgtgcattgcacatgaaattggttcaacaacggcagctgcctttaatgaaacatcatcaggaattgggtaaacaacttttgcaggagcagtaaagtattcttcaaaaccaccgttacgggtaacaccaacagcatcaaggtgttcacataattctgggcgttgagtccgacaatacttacattgaccacagtagatgttagggtcaacggttacacgatcacctggcttaacgttagtaacttctgaaccaacttttgtaactacccctgagttttcatgacctaaaacgataggaggaacagctgatgcagatcccggaagaccggcatagagcgctttatcagtaccacaaataccagcgtaggcagtatgaattaagacttcatcaggcttaatttcaggttctttaatatcttcaatttcgagttgttttttacctgttaaaacaagtgccttcataattaaaatacctctcttgtgaattttatcatttgtcaagtgatagtatagtgtgaaaacgccttaattgtcaaacgtccaacaattatctcacattcttttcgccatcataaaacgttaaactcagcaaatccgaacctaaataaatcccggtatagaagcattttctaaaaaagtgcaatttttaaatatttttttcttcactaagtttatgctatttttttgttatcacataaatggttttactttcattttttaaattacataatttcacaaggctttttatcctatttagcgttttacatcaagaaataaaatgtttctacatataaagtaataaattctaaatttatatagaaaatttctccaactttcagaaagcgcttaactaccattaggcacgccaaaacttatctccaaccgctcctcaaaatcgcccaaatggccgttataacggctattttccattgcaggatatatttttttatgttaccctaacaaagtattcgaacttagttaattatgatttccaatctaattaacaaaactcaaacgaaaggtggatttggcgtggacgacacaaagaatcaacaccggaagcataaacttattgaatatgctaacggtaaatcactagaggaaatcaacggaacagttgaagttcctcgtggaaaaggcttctggcgaacattattcgcttactctggtcccggtgcattagttgctgtgggttacatggatccaggtaactggtcaacttcaattactggtggacagagtttccaatataccttaatgactactatcttgatttcaagtttgattgcgatgttgcttcaatacatggcggctaaactcggaatcgtgagccaaatggaccttgctcaggcaacacgggcacgtaccggtaaagcattaggtattatcttatggattatgactgagttggcgattatggctactgatatcgctgaagttatcggggctgctattgctttaaacttactgttccacattccgttgatcccatctgtatttattactgttcttgatgttttagtactgctattattaaccaagatcggattccggaagattgaagcaattgttgcatgtttgatcttggtaatcttgtttgtttttgcttaccaagttgccttatctaaccctaactggggtggcgtatttatgggtctccttccatcagctaaggcaattgcccaacatccagaaattagtggtattactccattaactggatcattaggtattatcggtgcgactgttatgcctcacaacctatatctccactcagcaatttctcaaactcggaagattgaccacaatgatcttgatagcattcgtcaaactgttcgttttactacttgggattcaaatatccaattatccttagcatttattgttaacgcccttcttttaatcatgggggttgctgttttcaagactggtgctgttcaagatagttctttcttcggtttatatgatgccctgaataacacttctatgcttagtaatccaatcttaattgcggttgctaaatctggtgtattgtcaactttatttgcagttgctttacttgcctctggtcaaaattcaactattactggaacattaaccggtcaagttatcatggaaggtttcattcatatgcggatgcctttatgggcacgacggttagttacccggattatttccgttattccagttattgcttgtgttgctatgacgagtggtgagaataccatccaacaacacaccgccttgaaccttttaatggaaaattcacaggtattcttagcttttgcccttccattctcaatgttgccattattaatgatgactaacagtgaggttgaaatgggtgaatttaagaatagtggctgggttaaggcttgcggttggatctctgtaattgcccttaccttcttaaatctctacaaccttcctgcaacttatgaaggttttggtatttgggcaaaagggacatccgatgttctcgcatatatcacgattattgtcattcttgctcttcttatctggacttgtgttgaactctacaaaggggataagcgctttgctgctgaaggtaaaggattcggacaacgtgaagctcaaatgaaagattcagctgtagaagattaaaataaaaacctggaagcaatgctcatgtacggtaaagaagcaagcaaccgaaaacaatagatagaccgccagcactacactattccgaaccaaagaccaaaagataagcattttgagaaaatctaaacttttggattttcctacaatgccgactacggcggaatccctcccactccttatatatttctttctgtatacattaaatttgtatttagtaaaatgcagacaacaccacggatcggcttttggctggacaattccaaccaaacaccgcagcagacagtagaaaccattctgaacgttaggaagccggtatgattgttacatataaggggaagaaaaatttcttttagatacttgttttcctaaaactgatgtgatataataattcaattccagaaaaggagtaaaaaatatgcggcaagttattcttaaataaaactataatcaaatagtgggaacaaaggattatgatagtcccttttgtaggggcttagttttttgtacccaatttaagaatacttttgccttatcaattttgacatatccccaaaaacagcactcacaaacaggtgtatgctgtatatgtgtatgtccgcaaattatcatccccagtggtaaaagtattttactgctggggatttttatgcccttcggggcagtaaagggaggacaatcacatgaaaataatcaatattggaattcttgcccatgtagacgctggaaagacgaccttgacggagagcctgctatatgccagcggagccatttcagaaccggggagcgtcaaaaaagggacaacgaggacggacaccatgtttttggagcggcagcgtgggattaccattcaagcggcagtcacttccttccagtggcacagatgtaaagtcaacattgtggatacgcccggccacatggattttttggcggaggtgtaccgctctttggctgttttagatggggccatcttggtgatctccgctaaagatggcgtgcaggcccagacccgtattctgttccatgccctgcggaaaatgaacattcccaccgttatctttatcaacaagatcgaccaggctggcgttgatttgcagagcgtggttcagtctgttcgggataagctctccgccgatattatcatcaagcagacggtgtcgctgtccccggaaatagtcctggaggaaaataccgacatagaagcatgggatgcggtcatcgaaaataacgataaattattggaaaagtatatcgcaggagaaccaatcagccgggaaaaacttgtgcgggaggaacagcggcgggttcaagacgcctccctgttcccggtctattatggcagcgccaaaaagggccttggcattcaaccgttgatggatgcggtgacagggctgttccaaccgattggggaacaggggagcgccgccctatgcggcagcgttttcaaggtggagtatacagattgcggccagcggcgtgtctatctacggctatacagcggaacgctgcgcctgcgggatacggtggccctggccgggagagaaaagctgaaaatcacagagatgcgtattccatccaaaggggaaattgttcggacagacaccgcttatccgggtgaaattgttatccttcccagcgacagcgtgaggttaaacgatgtattaggggacccaacccggctccctcgtaaaaggtggcgtgaggaccccctccccatgctgcggacgtcgattgcgccgaaaacggcagcgcaaagagaacggctgctggacgctcttacgcaacttgcggatactgacccgcttttgcgctgcgaggtggattccatcacccatgagatcattctttcttttttgggccgggtgcagttggaggttgtttccgctttgctgtcggaaaaatacaagcttgaaacagtggtaaaggaacccaccgtcatttataaggagcggccgctcaaagcagccagccacaccatccatatcgaggtgccgcccaacccgttttgggcatccatcggactgtctgttacaccactcccgcttggctccggtgtacaatacgagagccgggtttcgctgggatacttgaaccagagttttcaaaacgctgtcagggatggtatccgttacgggctggagcagggcttgttcggctggaacgtaacggactgtaagatttgctttgaatacgggctttattacagtccggtcagcacgccggcggacttccgctcattggccccgattgtattggaacaggcattgaaggaatcagggacgcaactgctggaaccttatctctccttcaccctctatgcgccccgggaatatctttccagggcttatcatgatgcaccgaaatactgtgccaccatcgaaacggtccaggtaaaaaaggatgaagttgtctttactggcgagattcccgcccgctgtatacaggcataccgtactgatctggccttttacaccaacgggcagagcgtatgccttacagaactgaaagggtatcaggccgctgacggcaagccagtcatccagccccgccgtccaaacagccgcctggacaaggtgcgctatatgtttcagaagataatgtaactgcttccagttttttatttttgtaacgattctttcacaaaatgttcatacttgaacggtatagtatagacaatccctaatataaataaacccctatttttcttctatactatccccctcaaaatagctatgaagaaatacgaaaagtggtcggcccataatgagtcggccattttttaatacatctaggctcaccatggtataataaggaactagatatattactcattaagtatgaggtgaaatcattgaataataaagataataatcaaaataataataagcggcgacctactcgggttgagctttatgacactcctaagccaggaaaagaaaagaaaaaacgttctttctttaatcgtcagcctaaacagactacccctaaccataaacataagacagcatcccctaacaagaaaaagaatccatatggaatttcacgtcggatgttcaaggtcattttaggctgcctattagttatcttaattgcaaccattgttattttcttagttaaacaacaggaccctgtcaatgttgatagcaatgacactactgtctccacaagcacttcatcacgcaagaagcataaaaagagcagcagtagcagtcataagcatcgttcaagttccaatgacagtgatgacaatgatactcaagatacttatagtatttcaactcctagtcgttcggataacacgcctcaatcaagtcatccaactaaccaacaaccaactactaactcttcttcaactccacaacaaaaccaaccatcgcaggaagaacaccatgatcaaggcaacagccaacaacaatctacttcacaaccagcaagcagcaattctgggtcacagcctaatcaaagttcgcaaagtactagttcccagtcaaacccgcaaccagttcaacctcattctcaaaataatcagcattaatttggaataaaggggttgtcaattaaagtgggcgtgctataatcaagacaatcgattgaaggatatgcaccttcaaagtcctctacagagagtaagtgccttgagtggaagcacttgtgagtgacaatgatggttgtaccaccttcccttattattagccgagataaggctagtcggatcgtgtccgttaccgcaccttagagaggacattactagtgtgtcctaaagatgggtggaaccacgctaatttttgttaattgacgtccctgatactttcaacattgaaagtatcagggacgtttttatttatattaaaggagagatttctatggctcaggttgctgttatgtccccagatggatcagttaagaagatcgatcgggattcacaagaaagtttagaagcattacgtaagctttctgcattaatgttaaaggctgcattaaaacaagaatttaagggtattcgacttggtgaagctgtcgctgacgaagatggtttccacgttgattctgataaagataatcaacaagtttctgccgacgaattaccagctcttgaagacgtaatcaagggaatggcaaagaacgatgttaaggtagaatttgttgaagtacctgtagaggaagcacttgccgaagtaaaagatgatcgtttctcaactgaattgatcaatgaaaatgctaaagacggcaaagtagcaatgtaccaacttggtgatgtcaaagctgttgcagatgatgacattcttttatatggtaacgttgttaaaaacttacgccttctttctgttgctggtgcttactggaaaggtatgtcttcaaatccaatgcttcaacggatttacggaactgtcttctacaagaaggacgcattagaagaagacttaaagaaacgtcaagaagctaaggaacgtgaccaccgtgttatcggtaaccaactcgacctcttctttgttgatcctaaggttggtgccggtttaccatactggttaccaaaaggtgctactattcgccggacaatcgaacgttacatcattgaccgggaagttgccgatggttaccaacacgtttatactccagtcctaatgaatcttgatgcctacaagacttctggtcactgggaacactaccgcgacgatatgttcccaccaatggacatgggtgatggcgaaatgcttgaattacggccaatgaactgcccaagccatattcaagtttacaagcaccatattcgttcataccgtgatctcccattacgaattgctgaacttggtatgatgcaccgttatgaaaaatcaggtgctctttctggtcttcaacgtgttcgtgaaatgactttgaacgatggccacactttcgttacccttgaccaaattcgttctgaattcgcaaagattttgaagttgatcatgagcgtttacgaagactttgatattactgactacagcttccgtctttctcttcgtgaccctaagaacgttaagaagtactatgctaatgacgaaatgtgggaaaaatcccaatcaatgttgaaatcagcaatggacgatcttaaccttgattattatgaagctgaaggtgaagctgccttctatggtccaaaacttgatattcaaactaagactgctcttgggaatgacgaaacaatgtcaactattcaacttgactttatgcttccagaacgattcggactttcctacgttggtcaagacggtaaagaacatcaaccagttatgattcaccgtggtgttgttggaacaatggaacggttcatggcttacttaacagaaatttacaagggtgcattcccaacttggttagccccagaacaagtccacattatccctgttaacgaagaagcccatggtgaatacgcagataacctcgctaagaagatgaaggctgctaacattcgggttaatgttgaccaccgaaatgaaaagatgggctacaagattcgtgaagctcaaacacaaaaggttccatacactcttgttgttggagacgatgaaaagaataacaatggtgtatctgttcgtaagtacggtgaaaaggaacaaaatgaaatgagtcaagaagcatttatgaatgaaattcttgaagatattgcttcttactcccgtgaaaagtaattaagactaaaaatggctctatcacaactttgtgaaagccatttttttgttttaaattttttgaaagtgaaatttttagcataactttaatcaccaaaaataaaccgttttcgaagtgttcgtgaagttttggacaacctaaaattagtaattgacactattactcaaaggctttatagtaataaacgctcgcttctgagccactaaatatattaattaattattctaaaaacaaaaactatttattttggaggtataagatatgtctactatgaacgatttatttaaagcaatgggtaaagctactgaagaacatcatgctagcggtctttcatttgaagctaaaactgatgcacctgctggtattggtcaaggtatccttaacgttcgcaagtaattttaaaaggtcatgattaggaatttcccgatcatgaccttttttatttatccttaatagccaaagcaaatataaacataactaaccccagagcaaatagaacacttaatgaagctgcaccgaccgtcgatttaccagtccattgagtaacgacttcaacaataaaggggccaagcttcccaaggatattatagaaaccaaaaaattcgctactggcatttttaggaacaaggcggccgaagtatgatctactaagtgcttgaagtccaccttggcttgtcccaactaaaatagctaaaatccaaaaatcagtcaaagtttctaaccataaagcataaagacaaataaagaaataaacgataatgcccagcataataattcgtctcgtagaaaatctattagcaagccaaccatataaaattgaaaatggaacagcaattaactgaactactaacagaacgaccatcagcatcgtggtttgaattcctaagtctttaccaataaccgttaccattgtaaagattgtatcgacaccgtcaatatagaagaagtaagcaactaaaaaccatgtcaactgcttatattgattaatatgatgcatagttcttctcagacgacgcaaactatcgacaaaaggatttgcaacactgctgacgctataacgttgatgaccattttttaataacggccacgcaaaaataatccaccaaactgtagccaaaactaaatcgggctactccataactgcttaagagaccgctaaagcccttacttagttctgctactaaaaagataataaagacgactactcctcctaaatatcccattccatagccagtcgatgaaacacgatccatttgcctattatcggccacatctgttaaaaaactgtcataaaatagatttcctcctgagtaaccaataattgacccaatataaacgattaaaagtagttgccagtatttagttggaacaagggcaagcccgattgtcagtataattcccaaccaggtaaaaagatttagccagcgcttctttgcatacgggtaatcagctaatgcccctaataaaggcgctaataatgaaataacaagcgtaccaaaactattagcatacccccacagtgctgtcgagtttgctgcactaacaccggcatgatcagttactgctttgaaatagactggtaaaacagcggtcacaactaaaattccataaccagaatttgcccaatcataaaaaatccgttgccattgttgtctcgtaaacttcacaacgtcacctcagtctttaaagattgcatcaattgcttgtccggcagttgaagtcggataatgtaatcctaataatttagcaaatgtcggtccttcgtcaaccaagcgagcatgttcaacagtcgcaccacttttgatttggagaccagcaaaaatagcggtagtgaagtaatttgcttgtgttggcccgtaaccatgaacgccatgatagcgatcgtgagttccaattgattctggatcaactttttcgacaatcgctggtctgtttacctcatcggtgaaatattatcctggtttggcttcgacgaggaatgtgcacttaggatctgccccccgtttgatcgccgctgcgttatcatagattcgctcaaccccttcaacaccagcaatcatttgcttaatttttcctcgatccacggcaccacgagtgtaaatataagtttctccatcgcaagttttagcagtgacttgccagttatttcgataagtgcttttctttccaagagggtgaagaagtccttgttgcgcaaataacatatttaaatgaatcatcttatcaacattaatttgatagtgatctcctaaaatcacaaagtctgtttgcgcgtaagtaccggtatcttttgccgcttgaattatcttagctacacgtttatctagacggtgtaatgcttatttggcttgtggtgatcgaactccataacggtgacgcatactatccatatcaactaagtgaatcaatgttaagtccggctttttattttttattgtatcaaccgcataggctgttacaaaatcgtcaagccacggctgcttaatcccgtgacgtaatttaccgtattttttattcatttcatatagaaataacggactacttgcctttaacgaaaccagtacttgatttgtccaaattcgattaggaaagatttctgcaaggttataatcaatcttactgctagcagtcacaggccacaaaaatgcagcagttgttaagcccttttcttttgcaacatcatagaggggcatcaattgaatatcttttcgataccagaaccagtcaggcgattgccggcgcggctgcaatttagtattgttaataattccatgtacgaccggatactgaccagtaataatcgaagtatggtatgggatggataagttaacgttggaaagattccctcaacttttttcacccatgttcctttttctattaaatctgctaatgttggtgttaattgacgtaattcgtttaggtcacgaaaacctaatgaatctagcgaaataacaatcagcttatgctgtttcatcagttcatctgctttcttttcaaactcattagctattttaaaataaatcattgttaataactagttttgaaagaaattatcaaaaatcattctcatcgtaagcattaaaatttgtatgataaaaaagttaacccacattagtaagccagcgattttcaataagttttaaagtgaaatttgattcacagtaatttttaatgtaaaattaagtttcagttttcagtattttatgaaaggaatcataatcatgcaaaatcagttacccaagggaaaagagcatgagaaaactctcggcctctttgacctttctattctaggtattggcgcaatcatcggaactggaattttagttttaactggaattgtcgccgcggaagattcaggtccagcaattgttttctcttttctgattgctgctcttgctagtggtttaattggtctctgttattcagaattaaccactagtttacccaattcaggaagtgccttttattacgcgtgggtttcaattggtaaatttatggcgttccttgctggatggacgctgattggggtctacgttactacaaccgctacggtagccaatggttggactgggtacgtacaatcgttcctagaagtcctcggagttaatttaccacataaattactggttacgcctgcagctggtggttatgtaaacctccctgctgtcttgatgatcctttctatgacgattattttgacacgtggaactagtgaaagtaaacttgttaacaacttcttggttggtgtcaaaatctttattattgttctatttatcgttgttagtgctcaacatatcaatctcgctaactggcacccatttttaccatatggatacaagggaattttcacaggagcatctgctgtcttcttctctttcttaggatttgatgcattagctacttctgctgaagatgctaaagatgttgataaaaatattccccgggcaataattttatgtttagttatttcaactgctctttatattttagttagtcttgttatgacgggagttctaagttataaagatttgaatgtctctgaagctatgtcgtatgttcttttagctaagggtcataaatacgtggctgaaattgtttcacttggcgctgttttaggaattatggctgtcgtctttgcattcatctatgctggctcaaatatcatgaagtcaatgagccgaagtgcctttcttcctcaaggcctcgctaaagtcaacggcaaaactcaaagtcctaatcgtgctatttggctagtcggacttctttcagctgtcctagctggagaattcgatctccattatcttgcattaattgccaatattggatcattggttgtctttgctttaatttcgctcatcgtaattatcttacggtaccgttatccagaattaaagcgaccatttaaggtaccttttggcaacgttattcctgtgctatcagtattaatctgtattgttttattagtaagcatctcacttaatgcttggttaacatacttattgtggctagtagtcggattaggagtttacttcttctattcccttcgtcatgccaacgaatttaatttccaagatgaaagtgatatcccaggtaattaaaatttagttctaaattatgatagacctctacattgatccagaatgttagaggtctattttaatattatttagcacttcgattctgacgagttgtttccgctaagtggactaaattagtaacaaaattatgagttttggcttcataattatattggcgacccagcttaacaaagtaaccattgatataatcaacttccactggacgattatgactcatatcttggtacattgaaggataatgatgcggacagccaactttagagacataatttacactttctagctcttctgctcgcgtattaactaattgtacccctgcacgttcacagacatcatatgcttcatcgattaattgccgagatagttcatcagccttatcaaacgccgcatattcacccattgtaatttcaaacatagtacaaagggtattaacgactgaattaaagaccacttttgccatcaacgttcccataaaatcatctttaagggatggattaaagtttgcttttttaagttctgccattaacgcttgtgtcttctcatcaggcttttcagtataattagcccaattagtcgttcccatccctcgttctccaacaaattccacttcgccaggtttggttaaaatagttgctactaaggcagttccagcaactactttttcttttgggaaatacttcaataatttttcaacatgtcccattccattcatcgctgtcatcgcatattgatccttcaagaaatgttcacaacgttttaacatatcatctaactgcatttgttttaattcaaagaaaacaaaatcagcatctgtagcattgtattcttcaggtgtataaacattaacgggaacaaggtgtctatttttatgctcgcgagttacataaacgcctccttgttctttcatcttattgtaatgtggtaaccatccttcaacaaaatcaacttcattacctgcttcttgtaataaaacaccaaaccgtaatcccattgcacctgcaccaacgactgtaaatttcataattatctctcctttttatgactataaaaaagcgtccttagattaaacaacttaacctaaggacgctttttgcgtggtaccaccttaatttgccaacaattcacattattagcctcaaatgttcaatgcttccattaaacacgtcagctataatgggctgatcccaccattaattactaatttcatcatggcactcaaagtgattttcattataagcaggttatcctttttcatcaaccaaggactctctgctaatccactcataattactcttcttttcaacgtgttttcataatcacattttaatttttatctaatttaatactttgggttgtaaatgtcaagatttatttttgttataaattatcttgacatccctatttcatccgcgtattataatgacaactaaatgagagaaagcttagaaaagatgagtaatcttagaatcttattacagagaatcacggttgatgagaggtgacataagagactgagacgaagatggtcttggagcttcacgaattacgagtattttatataagtagttcacgattgacgaccgataaaacgtctgggtatagcttccattagtgtacctattgaggatagtattgtgagatactatcaaattagggtggtaacacgttaattaactattgattaatcaacgtccctaggaaaagtagaaatatttttcctaggggcttttttattgcttcaattcttgaacccatcacgaatagaaaggatcgatttactatgactgaattcactacacgtactacatcaccatttcgttatgacatcgttggaagcttccttcgtcctcaagagctaaaagaagctcgtgcaaaatttgcaaacggcgaaataacacaagcagacttaacagttgttgaagataaagcaattattaatttgattaaacaagaagaagctgccggcctgaaagcagttactgacggtgaattccggcgtagttggtggcaccttgactttttctggggattaaatggcgttaaaaaagctactctaaaggaaggctataaatttgcagatgaagagactcgtcctgaaactgcgcaaatcactggaaaaatctccggcgaaaaccacccctttgtcgaacacttcaaatttacccaagctcatacctctgatggcgttcaagttaaacaaactatccctgcgccagcacaatttttagaagaatttcttcgtcccgaaaatcaagctaatgctaaagaattttatcccaaccaagaagatttagatcatgacgttgccactgcttatcatcaagtgattgaagatctttatgctgctggttgtcgtactcttcaactagatgactgtacatggggaatttctgttaacgcctttgctaacctaaggaaaaaagaccccaatgctgatgtatctcagcttaaagccctgcaaaagcgatttttaaaagtaaacaatgaggcaattgctaatttacccgccgatttaacaattaatacccacgtttgtcgcggaaactatcactcaacatgggctgctgccggtggttatggaccagttgccgacacactatttgctaaagaaaacgtcaatgccttctatctcgaatacgatagtgaacgtgctggcggatttgaaccacttagcaaagtttctgatgataaatatgttgtccttggtttaattacttcaaaatcaggtgaacttgaagataaggcagcaattatcaaacgaatccatgaagctgcgcaattccatccattagataagctctgtcttagtcctcaatgcggcttcgcatcaactgaagaaggaaacattttaacagaagaacaacaatggaaaaaggttgcacttgttaaagaaattgctacagaagtttgggaataatttaaaatgaataatgggagcgaggcagaagtcacttgtgacttcgtttttcgacgcgaagctagcctctgggagcccccgcaagcaacaataggcctctagcgttcggttttgccggacgttagaggccattgttgtactgcgtatttgctttttatgaaagtaacttaacttatgtcacagtcccatttattcttctcccactaaattgccaatacacggtctttatgcggagagtaattaaacagaacatctgtcaaatccaatcctgccttatttccatgatgggtgccatcttgccatgcaggaatatgagttacatcatagacacgattattaattgctacataagctggattcccgttttgcccatcatatttttcaattcttctcttgtaaatgtttttgccataatattccgcctccttatttgatagtgtcaattcaatatcctcactatatcatggaagcgcacacaaaaaaattaataattacctcactttaacgcaaaattatactctattagtattttcttcacaattaatctaatatcatatctaagtgcggaatattgtcttcaaggtaaacatctgaaatcggcttaaatccaaacgatgcgtaaaactctttaagatatgcttgagcttgaatttgaattgtcttatttgggaaaagacgcttagtttcatcgaccgttgcctgaactagctgacgtccgtattcatgtccacgaaattgttttaaaactaatacgcggccaaaagtcgcatgagagctgtccttagccataattcgcgtataacctactaagtctccctggtcatccttcagcattaaatggtgagcttgataatcctgttcatcaatttcttgataaggacattcttgctcaacaacaaatacttttatccgttcttctgctaatctacaccattcttgagcggtcatttcacttagcgtttttacttcaacattcatattaaaacctcctaaaaaataaaagagtactaaccaacttcttcatgtcattgtgacaggccctagtagaagatggctagtactcttaatgtctttaatccggggactaaagacgagtcgttagtaaattattcggtatcagtatacaatggattaatctatcttgcaattagcgatttaataccaagcaggtttatctccgtctgtatttggtttattcacaccaaagttttttcgtgcatatggtgccggatcatcaataatttttgctacaaaattaccaattgactttcgcgagacctcggtacctttaaatggttctccttttgcagtcgtttcgtaatccacttcatccttatctgttaaccatgctggtcgaatgattgtgtaatcaagggttgaattttcaattacatcggcagcactgcgataagttcctaaataactatctttctggccgccacctaacatttcattattccactcaccaaatttacctggaacttcatcatagattccaatcgaggaaatccagactaacggctttacagcatatttttccattaagctgacaatatttttagcttgttgcgtaatttcaggatttcgtagattagcataaactacatctgctcgttcaatcgctggctctaaatcgccaatatttaggacatcccctttaataactgtttcacgattttcatcgacaacattcatattttgtgggtgccgagtaaatagtaataattcatcattgccatttgctaacaatgcatcaattgcgtgtccagcaatttttcccgttgcacctagaatcaaaacttctcttgccattatttctacctcctcataaattctacttttagtatacaattctctataccaattaaaagtaagcacacacaagtaaggtagttacactcaggtaagatatgattgatggacaagtaatcggcaaaattttattttttagtatattttttgccccactggttaattgacctaattattggtaccaaactttttcctacttccgtcaatgaatactcagtcttaggcggcactgtcgaataaacacgcttttgtataatatttgctccctctaagtcctttagttgaagagccaacattctctttgaacaatctggaattaatttttgcaactccgaaaaacgacaaggctcatattcactaatttgatatataattacgcttttccactttccgtttattaacttaagcgtattctcaatcggacaatctttttcgaccattttttctcctttctctagtgaaataaaattcacttcttgtatatttttatttttaagttactattagtaagtaaagaaatgtacgggagtgattattatgaattcacaatttaacagtttagctgcaaatcgtcgttcaatctatgcgcttggtgataatctttcacaaacaccagaagaaatttttgacttagtgaagcaaacaatcaaaaactcaccaactgcttttaatagtcaaacagtacgggcagtcgtattatttggcaagtcatcagataaagtatgggaaatcgttgaggatgctttacgcaaaatcgctaagagtccagatgcttttgaacaaacaaagtcaaaaattgatagtttcaaggcaggctatggaacgatcctctactttactgacactacaattgtgcatcaattagagaatgattatccatcatatgcagctaattttgcaaactgggctgaacaaggcctcggtggtgctcaacaagcagtttggacagcactcgcagaacaaggaatcggtgccagtcttcaacattataacccattgattgatgatgcaattcatcaagtatttaatcttccagctgattggcaattgcgtgctgaaatgccatttggttcaattgaggcaccagctggagaaaaggctcagcttgatgacgaagagatgttcaaattaatcaagtaaacttattattctccatcctcttgaacggtatataattattgtaaacacgttaaaggaggaattttaatggaacggcaacctaaaatgtataatactggagcagattatgctttagcaatcattggtggtaaatggaagtccgttatcctttatctcttagctggtcatccccgacgaacaagtgaactagttaagcagctaggcacctcatataaagtcttgagtgaccagcttagtgaaatgatagatgccggcctcgttatccgaaaaagtttcaatacgattcctccacatgttgaatatcgcttaactcctgagggtgaaaatctttatgctgcccttcgttatttaaattactggggtgaaaatagagcaaaacaaactggtgacattaaaatcatgtgtactgacgaaatgaagcaggtcggcgatgatggtctatgtgtcatcactaaaaaacatcttaatcattggcgccaagaaattgtaaaaagcaaggacaaagatatttctatctaagttcttgcttttttgtgttctttaatctaaaagccaacgccattataaatataatcatgtagctcgcaagaataagatgggtattcatgataattggaaagctttgaatacttgtttttcccaccgaaaacgcaccaaaaattctattaattcctgttgttccagcaaaaataaataaacttccccacattactaattgggaaattatccccgcaattgatgcatagtaataattgacgatcgaagaaatactataattatgggttgctttctcgtagtcatcaattgctgttttacgttctgcaccggcaaagctacggatgataaatacgccaataaaatatgttggcaaccaaaatgttaagagaattccaattgttagcatcactaaattaatttgacaatccttaaaatggaataaatggtgggtttgttttaccaataatcctccaaagacgaaagcaaataagtaagcaacaattgtccaagaatacatttttgtgccatacaaaatgccaataaaaacggtactatacagggtccaatactgaccacaagcaccataaagcattattcgttgccgtaaatgattgggatagtgaagtaatcgccgatggtttacaagcaaggtaaggatcatcgtgatgaggaagattaataaaagagcggttccccattcaagtggtttcccaaagcctaaacttctccctaatcgcaacagtaacattgcgccaagcaaaattaatgctagtaagtaattagcccaatgtagacgaactggcagcggacgaattgcatggggtgttttccaaattgatcccattgcaccaaaagtaatgattaacattaaaacaaaactaattactggcttctttatccacacaattatcccaaacacaatcaaaactataataacttgaaaaagcggcttaagatgatcctgctggggtaagagtcctcgttttattaatcgccgccgctgacttattgcggttggaaatagtcgagaggcaatccctgcccctgcacctgacaaatcccagaagattggttgaaatccaccaaacatccctaaaaagtaaccaataattccgctataaagaccaatccaggccagccgttgataatcgtattctaaatcacggcaaaataataaaattgtatgccggaaagcatagaaaatagcgaagggcaaggcaccaacaaagatatcagactgttctttagtaagggaaatatacagcaaaaaaggcattaaatttaataataaactacagacaccagtcaacttttctaattttttcatttttatttcctctaatgctggtcaattgcactattcagtttctttcgatttactagaaaaataataataactaacgggacaataaatagcattacgggataaaaatatttcacaggtaacgtactatcaacaatcccccgatgattggcccaagcgtcattccaatatcaaggccgagaaagaatgtcgaacttgctaaccctcgttcattatctggagctagcatcattgcagttgattgacaaacggaataaataataccatagccaaatgccattccagcagctgccagtgccatttcaatgttatttttcataatacttaacataataagataaaagattgttgcaaccgtgcttaaaatcaaccatggttcaaaacggacagtatcaaattgggtccgtaagaataatcggctaagtaaaagaactacagcataaattaagaaataagcaccaacagcaatagataagtgacgttgttcagcgtactcaacaatatctgcctgcgttgcaaaatatgggatagcaaataaagctgttaaaagggcaaccgggatagcgtctcgctgaatgattttaatatgaaagccactttgttttacagagtgtgctgccggttgagcgcggttactgacaaactgaattgtgacaacaaccagtaaagccgataatgctgaaatcaccattgcagctcgataaccaataattcgatataagttaattgatacagcgggggcacatgccattgccaaagcgttcatcagtccataaaagctcattgcttcgccaacatgattaaatggaactaaatatgatagccaggttgtcatacaaactgtacataatacaaatcctaatccattaaccaaacggcatattaacaagaaagtgctattaggcgttaacacataacctgcaaccccaataaagcacaatattccaccccaaaaagctaatgaatattttgaaaaacgatcagtcagattaccagcaattggtcgcaaaaacattgaaacaatactcatcattccaacgattatacctgcaaaagcacttgatgcgcctaaatcttgagcataaccgttaatcaatgggttacagtacatattactaaacataaaaaagaacgaagccgccattacgagcacaacatcttttgtaaaaatcgatttttccttcgccatcaattcccctactttctttgcatgattttaattaaattctaattactatcatacaactatttggggaagttaaatgatttcccaggaaataaataaagagattgggttttgtttcccaacctctccgtgtgtacttcactatttatattttactgcaaagaatcccaagctggtagagtaacgggttcactggcagctactttctttactcgatcgctaaggtacttcttattaataacagcctcataagtatactcttcaaaccaatcttgggtcattacaaagtatccgttatcgccattatctttaccccaactgttttcaatcttccatcgtgtaggttgaccatttaccatgtcaaagcctgttaatgtcattgcatgagaaacgacggcttgcttagtttccaaacggtgcttcttatccattacaaaatcaacatcaagcaattcctctcgatgatataattttgcatccatcaagcctcgcttacggtccatttgttggagaacatcattcccaacccaaactgtttcaccagcttgcaactgtttgatggctccttcttgtaattctgcaaaaggaacattaacaaatttaattggcaaaccatcaaccacactatcttgcgctggcattaaataactccgatccatttcatgatcaggagcgttagtaactacaacatagtcacttaagtttgtatcaaagtattcatgatagaactttaatggcgttaagccaagaacttggtggaactttttatcatcatcccgatattcaagatcaaattttgcaggcggttcaccaaatgagtaggctgcaatcttataaacgtcacccatcattcgttcttgtgcttcctgtaattccgttgcactggcattagtttgcaccattacccgtaattcaattgcatctttgcgcattaagctatcaaatacttcggctacatctgaagtatccttcgtattatgtgtgtcaggcattacatattctggaacaacaccatatttctcaataatagaagcggcattagcccattgtccaccatcatttaatgcaaaactaaggtagaaatcaacggttcgatcatgcaaaggcttatcagcagttgcaataatcttctggaaaaacatatttgcccgttcaattcgatcccagaaaaatagataattttgtgacaattcaaagtccttgaacttatattttgttgcaaacttatgacgtaatgtatttaatgctgcaaaagaccagcaacgtccactatgacgctggttggttggcttccccgtcttaatttcataagaaaatgctcgatgaagacgttcgcttgccgttggatcttcactcgcagctttaatcccatttttttgtattgcccgggcaataatttctgcatctttacgtgaatgaaattctttctttaatttttcaaccatttttgaggttaaatcgtgttcttcagtcacaataaatcccttctttgcctaaaattctaaaatgacttatacattattaatgataccgcattttcttcaaaattattgacttaaaagcttttctattttaaacaagcatcaatcctttactgcttataaaaagtaagctaagattgtatttagtaagtcacttttaattataaattatatgaactgcggtaaaattctatctaggaggtcgattaattatgaagaaagtatttgttgtcggtggttcaggccgtgttgctactgacttaattaaagatttagttgccactggtaatgaagttacagctggtgctcgccatccggaaaaagttattaagttaaaccacgttactgctgttgaattgaacctacatgatagtgttgaaaaaatcgctgaattaatgaaaggcatgaatgcaatttactttgttgccggatcacgtggcaaagatttactgcaaactgatgcgatgggagcagttaaaacaatgcaagctgctgaaaaagacggtattaaacgttacattatgttaagttcgctatatgctttacaacctgaaatgtggtcaaaagttccatcattagcttcaattatggattataacattgccaagttctttgctgataattatcttatctcaaatacaaatcttgactacactatccttcaacctgctaatttaactgaagaacccggtaccggtaaaatccaaattggtgaaggctctgcaacttctaatccgattccagacgttgcccagactttagccgatattctacaacacgataatacaatcggccacgtcatcatgatgcggagtggagatacgccgattgaagaagcactagatcaaatttaattttttacaggttgttgaccagtcgaaatagcgtaagattggcctacaactttttctattctaaaatcaggtaatagtttagctaatttttctcatcagccgtataataaacattaaaaacaaattaagaagggaatcttttacatggcaaaactcgaacgcttttataatactttccaacctgaccattatgatgtttttatcgatattaatcgagcaaagaaaactattaatggaaaaacaactatcactggtaacgcgactgatcctcaaattgcaattaatcaaaaaaatttgcaggtcactggtgttcaagcagacggtcaagaattagactttaatattgataatgatgccgaggcagttcggattacccttccgcaaactggtaaagtaacttttactgtaacttataatactaagttaactgattcgatgatgggaatttatccatcatactatgaggttgacggggagaaaaagcaaattatcgggactcaatttgaaacaacttttgctcggcaagcttttccctgtgtcgatgaaccagaggctaaggctaccttcagtctagcaattaaatttgatgagcatcctggtgaaaccattatcgctaatatgccagaagatcacgttgaaaatggcatccactactttgaacccactgtgcgaatgtccacttatcttgttgcctttgcatttggagagctccaaagtaaaattactgaaacaaaaggtggcgttaaagtaggtgtattcgcaacgaaagcgcaccaaccaaaagaacttgattttgcattagatattgctaagcgggcaatcgaattttatgaggatttctatcaaactccgtaccctcttccccattcatggcagttagctttacctgatttctctgccggtgcaatggaaaattggggattggtaacctaccgagaagcttacttattactcgatccagacaacacttcccttgaaatgaaacaattagttgcaactgtcatcacacacgaactagctcaccagtggtttggtgatcttgtgacaatgaagtggtgggatgacttatggcttaatgaaagttttgctaatatgatggaatatgttgccgtcgatgctctccagcctgactggcatatttgggaacttttccaaacttcagaagctccaatggcattacaacgagatgcaactgatggtgttcaatccgttcatgttgatgttaacaatccggccgaaattgatgccttattcgatggtgcgattgtttatgccaaaggatcgcgaatgttagtaatggtccgggctcttttaggtgacaaagcgttacgagaaggtcttaagaattattttgctgctcacaaatacagtaatgcaaccggagctgacttatggaaagctcttggcaacgcatcggggcttaacattggaaaaatcatgaattcatggcttgaacaaccaggctatcctgttgtaacagcaaagattaatgatgatggcgatttagtactgtcacaaaagcaatttttcattggtgatggtaaagatgttgatcgtcaatggcaaatcccacttaatagcaactatgatgaagctccacaaattatggcggaacaagaactcaaccttggaaattatcaagcattgcgcgataagaatggtcaaccattccgtctaaacctcggcaataattcacatttcatcgtaaaatatgatgatacgctactaaacgatattttagatcatgctgatgaattagacccgattacccaacgtcaacttcttcaggatctgcggttacttgcccaaggacaacaaatatcttatgcgtcattaattccattattaaagcaatttaaagatagtccttcagcaattgttaacgccgaactataccaaatagctaatggccttaaaatgtttgctaaacctgattctcctgctgaacaagaactacgacaattctctgatctattaagtaaggatcaagtaaagcggcttggttggttacctaaagatgatgaaagcaatgatgaccaattgacgcgcccttatattcttagcacttcactatttgcacgcaataatgattcaattactcaagctcatcaaatctttactgaaaatcaggataaattagagtctctttcggcggatattcgtggtttagttcttaaaaatgaagttcaaaacttcgggagtgctgaattatttgataaattaatcaaagcttaccaacaaacagcggacgcaagctttaaacaagacttgcgaatggcaataccaaatacaactgatccagcattaattgcaaaagttgttagttactttgaagatgctgacgtcattaagccacaagatttacgagcatggtatcgtggccttcttgccaataaagcaggtcaacaagctgcctggaattggcttcgtgatgaatggcaatggttaaatgacacagttggtggcgatatggaatttgctacctttatcactgtcactgccggcgttttccatactcctgaacgattgaacgaatttaaagacttctttgaacctaaacttaatacaccaggtttaacccgggaaattaaaatggacattagtgtaattgaaagcaaagtcaatttaattaacaaagagcaaacagctgttaatgatgcaattgcgcaacaataattaactgtaaagccctataaaaaacgcaactaaggatttttcctcagttgcgtttttattttaaatctgctgctttaataaatctaaccttgtactttggcgttgtaaaatatcgtcgattacatctgctaatgaaatttgcttcatctcattaaaagctgctgcttgaatctgatcataatacttttctaatgacgcctgaatatttccaccaacaatacacttcaaattagtttttggatcaacatgaagtaaatcatgatccatatttattgcctggtagatatcaaacaggttaatctctcgtggctttttagctaatcgcggttcagcagccccctttctagttacgatcaaaccagcagtcctcaaatctgacattaattgacgaacaacactcggattcgactcaatactatcagcaatcgctttactagataagtcaccatcctgataaacgtgcaaatagcttaataagtgaacagcatcacttagtttatatgaatatttcatactcctattttatcttgttgttttataacattcaagcgctatagtattaatttatagttttcacttttaataactacgcttgttaaataattttaattctagcaaaataaagacatgataaaaataaaatcacatgtttgagcttgattaataaatatatttagcatatattactactgttggggtaggaatctcagagttattgtctaacggaacggaatgtgaacgttagaaggaggcttataactaactgctttgttattccgcattcaccatgaacggaaacgtcaatgtgttccctaacaaaattttcaaaagggagtggattgatatgtctacgttatcatttgccggaccgcgttttactacaaagaatttgactttagctgctatgctggtcgcactgcaggtaatcttaaataaactttcaattggagatccagcggttttaaaatttagttttggttttattgccactgcacttattggttactgtcttggaccatggattagtggatgatcaatggtcgtatctgatatcataagtaatactattttaaattcaggaagcttattctttcctggctttaccttatgagcttaagttccagtagtaccggccatactttcatggctctcctcttcattcgtttgccaaaagagttgattatctggccgattgaaaccttgcttgtactagttatcctgcggcaattatcacgattaaatttaattgcaaagaagagcgaaaaataaatttatttggtggattatagaatgaagttagccacccagttggtggtaaataaaaaacgccattcggcgtgacatcaggtatcatattaagtgaaccaaacctatatgaaaggatgtccgtcaaatgacgcacttaaatgataccatgtctactagtttattgactactcataaaaagaatgctcatcttactaaagaagaacgtgtgatgattgcgactttaaagtcgcaaggactttccaatcgcgcaattggtcgccaattaggagttaatcatcaaacaattaataacgagctcaaccgtggtacggtccgccaacttcgtcgtcaaaaatctaatggtaagatttacgaatattcttactacatctatagttatgaagctggtcaggccacatatcttgaacatcaccgccattctggtcgtcgtcgcttatattattcttcaaagcaatttttacgattagctgatcagctaatgcttggtgagtttgacgaccaccattactccccacaagcggttatttataaggctcgagatttaatgaatgatggcaccctgatcccaaagtcggttgtaactttatatcaatggattaatgagggtgtgcttcgtacgtccaatttagacctctttgaaaagcctaaacgtaagcatcatcgaactcatccgcaagctaaaaggtgcttaggtcctaatattgctcaacgacctcaaactgcggaccaacggtccgaaattggccattgggaactagatacagttcagggacagaaaaacggtaatgacagtgttgtactagtaatgactgatcgcctttcacgagttaatatcacgagtaaaattgctggtaaaactgcgcatgcagtaaatcagttctttataaatttacgccagaaaatgggcacagatgcttactatcgcatctttaagacaataacctctgacaacggttcagaatttagtgagttaacacaagttcacgatcatgttttctatgctgatccgtattccccttgggaacgtggatccaatgagatcaataaccggtttctccgcaaggagattaccaaaggtgaagctataaataactatagtagtgctcagatcatagcgactaatgattggatgaatcactatccacgagctatgtttaatggacattcgtcaatggatatctatcgtaaggccttctaccaagagatatcacagctccatcaaccaataatcaattggtcagtattatttatttgagtccagtggctaacttattcttgaaatttaggaaataaatttatttaaaaaagtattgcattttaaatgaattaggttaaaatacaattaacaaaataaaaaagcgatgagaaagaagagtaactagttgtattcgttcagtgaattggtggtagtgagaaaccagtcgaccctacactagtgaataacactttcgcgagtgctgccaacccaaataagtttacttaaagtaggcttggccggatccggaccgttacctcaccggcagagcatgatgtgctcttgaggaggcctagttttatactagacaatttgggtggcaccgcggaaaaaagcctttcgtcccttgattataaggggaacgaagggcttttttaattcattcctaaatctattattttaaggagtgtctattatggacttaactattccaaaggattacgatccacgtctttcaattagagaaactgaaactgctattcgttatattcgtgaaactttccaagacgaatttggtaaagagttaaaccttcaacggatgtccgcaccaatgtttgttgaaaagagtactggattaaacgataacttaaacggtgttgaacaaccagtatcgtttgaaatgaaggatatgccaagcgaaactgttgaagttgtccattctctcgctaagtggaaacgtcttgctcttaagcggtacggttttggtatgcatgaaggtctctacaccaacatgaacgccattcgtaaggaagaagacctcgataacttccactcaatttatgttgaccagtgggactgggaaaagattattagcaaggatgaacgaacagaagaaaccttaaaggatacagttcgtgatattttcaaagtgattaagcatatggaacacgaagtttggtacaagttccctcaagctgtttaccatttaccagatgagattcactttgttacaacgcaagagcttgaagatcggtggccagacctcaccccacttgaacgggaagacaaaattgctaaagaacttggtgctgtttttgtaatgaagatcggtgacaagttgcaacgcagtggtaagcctcacgatggtcgagcacctgactacgatgactggagcttaaacggtgatattattttctggtatgaacctcttcaacgccggatcgaaatttcaagtatgggaattcgggttagtccagaatcaatgaaataccaacttgaacaagccgatgcaactgatcgtgaaaaattaccattccataaaatgttgctcaatggcgaattaccatatacaattggtggaggaattggtcaatctcgcctttgtatgctccttcttggcaaagctcatattggagaagtacaggcaagtatttggccagaagatatgattaagaagtgtgaagagaaccacattcaaattctataatttaagggagagtataaaagtggaaactattacaattagtgaagcaccaaagcatgttggggaaacagttaaaattggtgtttggttaactgataagcgttcaagcggtaagattgcattcttgcaactccgtgacggaactggatttttccaaggaatcatccgtaaaaatgatgtttctgaagaaaaatttgattctgccaagcatgatttacaccaagaaaccagtttttgggtaaccggtgaaatcgctgaagacaagcgttcaaagtttggttatgaaattcacatcaaagactttgacattgttggcgaaagtgaagattacccgatcggtaacaaggaacacggaattgatttcttgcttgataaccgtcatttatggttacgttctcgcaagccgtgggcattaatgcggattcgaagtcgtgttaagcttgcgacaatggaattcttcgaaaagcatggatttactcaatttgatgctccagaactaactggaagtgctcctgaagggacaacagaattatttgaaactgactactttgatcgttctgctttcctttcacaatctggtcaattatatgcagaagctggcgccatggcattaggccgcgtctacacgatgggtcctactttccgtgctgaaaagtcaaagactcgtcgtcacttaatggaattctggatgatcgaaccagaaatggcttggatgcaccaagatgaaagtcttaagattcaagaacaatacattgcttacttggttcaagacttaattgaccactgtgcacgcgaacttgaaatggtagggcgtagtgtagaaagtttaaagccgttcactgaattaccatatccacggatcacttataaggaagccattgaaatgcttcaaaagggtggctttgatgtagaatacggtgcggactttggttcaccagaagaaacctacttagccgaccaattccaaaagccagtctttatcttgaactaccctaaagaaatcaaggctttctacatgcctgaagatcctgaagattctcgccaagttatctgtgcggacttgcttgctccagaaggctacggtgaaatcattggtggttctgaacgttcctacgactacgaatacatcacaaacaagcttgaagaaaacggcttaagtaaagaagattacggttggtacgacgatttacggaagtacggttcaattccacactctggatttggaatgggacttgaacgattccttgcctggattactctccaagaccacattcgtgaaaacattccattcccacggatgcttaaccgtttgaacccttaataacgaaaaagatgagactagatttttagcctcatctttttttatatgcttttttttgaactcaatttactttttctttactattaaaatgagctgttccttttccccagtaaaatccttgttgtaaaataactggattcccagcaaattttttagctaattgccgatttgaaattccttcaataacaaaggtaagatgatgtttttctgcaaaagctaaccacgcattaacaaagcttatcatcagttcataatcttcatccttaaaaagtaatagcgataatttgattcgactaacaacctttagctgtcttttaatgaatgcatagctattactacccgcacacacatcatcaatcgccaattcaaagcccatttccttgagacgttggatttctctatctaaataatcaagactatgaatcgtttcgcggcgttccgtaatctcaatggccacgtgatcgtgatatgcttcgcgaatctctgctaaaaattgccaaatactttcaaatttcatttgacatggttctaaattaatatatattttgcgattttgttgttcgtttaaagcattttttaatgatttacggcttgccttaatccatgcatcgttaccctcttgtgttgtgagactgtgcaagaaattaattcctggaaattcgccattattatttcgaataagcatttcataagtgtcaatttcagcattcatcgcttgatcaacactaaggattggctgaaatatattgtacatttttatccctaacttttaataattgctatttattttacgttctgaactagtctttcgaggacgttggtgatgctgatcagtaacaatccatccccggccattgttctttacaccatataacattttatcagctcgcttcagggtcgtgtcaagtaattcatcattcaaatgatcagttaaactgcatgaaaagctaattgttaatttcattccctccttggtaacaatcaatttattattaaagaatttttcaattgactgtagtaattgataaacctcttctagtgaatggttagaaactacaatagtgaattcttcacccccgaagcgatatacataaccatgcttggaaaatgcggaatgaatttgttcgcgaaaaactgttgaaaaataatttaacacttcattaccagcaaagtgaccgtatgtatcatttatcttcttaaagtgatcaatatctaatgccccgattacgatattatggatttcactattattatctaatcgattaatttcttgactaagcgctcggtagttaagtaaccctgtcaaatagtcacgttcactttctttttcaagaagttttattttttgctcatttttcttctcactataaaaacgttgctcttcaaacatcgcaataacgaataatcctaacgtggctgcggcaacacttacaggtgaaaagctatggttaatccccagcgatactaactcaactattcctagcgatgcaatggcataaaaataactaattcttttagaaatgctgcgccaccgcgttaaaaccaaacaaattgtcgtaaaaacaatcgattcaatgatccaataccaccagtcctttagcggtaaaatccccattaagtattccacgacattcacaaataacggggttagagctaataatacccaccatattttatatactttatcgcgaaaaagcattgtgacagaaacaacttgcatgaaaacaacttgcccgatattaaataaggacaactgaaacaaacaaaattcctgaataaagtaagtaattataataacggctcctagcccccaactagttaaccgtgaattcttatacgaaacccaataccgttcaaaataaatttgactgataatcatacaaataacgatgattggtaaatagagtatcgcgtaaaaaagtttaagcgccaacttattttcaccttttcaaattttatttttattaatagctttaaaattatacttcttatagtcgaattaatctagtagcgcttccaatcttcatttaataaacgtttcctgaaagaaccgtatgatataattatttctgctaacgcgttaaaaatattaagaaaggatgacagatcttatctttataatgaaaaataattaccatgatatgtattttgagcaccaccactggctcttaaaaattcgacaaacactaattatgttccttagctggtgcattttacttatccccattattatcactacttcaacctatgtggcttaccggacaaatggtcatcgcgggtattttttctgggattatgctgaaggatttcgtgaacttaattttttagtaatcattttgctatttgctttaggaatgattggggtattctgcattacaatgggatatatccaagctcaaaggactcgtggactaactacaaaatggcccatgttcgacattaacaaaagtcatttacaacgccaacgagctgaatcattcatgactaagcagtttggtgattttgagatgcgaataaatacgcgcaattttgctgttaagcctgaacaaaatctagccaagaataaactgcgcgatattattaacaagcccataggagatgataaagatggtttctaacattttctatgaagcatttcaaactaactccccatggatgatctctcttataataatcaatttaattttatgtatatatcctattttaggagcgatgttctggttctttggcgcaatatcatatgttctatttcgccaaaaagaagaattaccaccaaaagctgaaattaccaccgaaccttttgtcacgattatgattccagctcataacgaagaaatagtaataaaaagcactttagagtatttattaacccaattgaattaccataattatgaagtgctggtaatggatgacggaagcgatgatcgcacccctgagattcttcgctcaatgcaagcaaaatattctcgtctcagagttattagaatcgaacaaaatcaaggaaaggcccatgcatttaatattgggcttttctttgctaagggtgaatatattttgagcaatgatgctgatactatccctgaaactgatgcactgataaagtatatgcaatattttacaagtactaacgggattaactatgctgctattactgctaatatggacgtttataatcgttcctcattatggggtaaatctcaaacggttgaattttccagtattgttggcataatcaaacgaagtcaaactgccattaataacacgatgtatgcatacagcggtgcaaataccatgtatcgacgcgattttcttattaatgttggtggtttccgccaagatcgggcgactgaggatattagcattgcctgggaccatacctttattaatgctactccgaagtttgctccagatatcgttttccatatgaatgttcctgaaacgtttcacgatttatatcggcaacgtaagcgatgggcccaaggtgggacagaagtttggctttctaattttctgaaggtttttcgccatccgtggcaatatcgatttgtcatccccatgctaacagacacaaccttatcgattatttggtctttctttttttggataacaagtatcattttcattattacaatgttgtattttgcaataattggtaactacgaacggatttggcacggcattgttatgagtatgatctttgtcaactttcaattaatagccggtctttttcaagtactggcggcattgattcttgattttaatggatctaagttacgctatttaatgttttcgccactttatctcttatttacctggatcgttaatcctttaacaatcgttactacatttcataaagcgataaaaactgttaccggccatggaagtggtaaatgggttagtcctgaaagaaaggtagttgataatgatggcaaattttgaaaattttctttggtggatattcattatctttaccctaacttgtggcggcttttgtattgagactcactatcgatataaaaataaagacgggattgataatgagcacaaattttcaaataaatataagtattttggccaacctgtttatgacaaacaaaataaaattcatggttatgaacttttattacgggaatacaatcatcatactaataaatggcaattaccacgaaacgttgtggacttccccctcagtaaaattgtttctacaatccaagaaatcaatccacagttaaaagatatcgcaaacttatcgttaaatatgaccgtcagccaaattaccgattttcgcgctgagtatttctttacttgggtcttaggaacgacaaatattaagcaactagtcattgaattagatgctaatgatattagacgtgccaatatttttaaacgtaaagaaatattatatatactaagaaaaatcaaacgacttcaaattaaagttactattgaaaatgttgattcttctaaaaaaacatacaatttgttacagcagtatttgccagatattgcctatttaaaatttaaaatttaatattcattcttttaataagtcagcaaatcactggatagatgttacactcgcacagtggcaacgaagaagcgccatttttaacattgaaatgattgtcggtaaaattgaagatgctaaccatattgcattagtaaatcaactaaatatccctttccgtcaaggttatgcttacggtcatccagaaaatttaaaaaaatcgagtaggagataattgattagttcaattatcgacctctcacaccaccgtacgtacggttccgtatacggcggttcgacaacttaatcacattgaattgactggagcgtcttggacatattcataagtccgagttgttccagttttctattagttagagaatagctcaaggtcttactgtgtgcagttcgccagtagcccttgcgggtactagcgaagacatatgcatcacgctgggacagccccagcttctgtaagttagttaccttagttttaagcttcttccattgcttccagatatactgtcttattcgggccctcaaccacttgtcaaggcgttgaataaagtcagttagtttcccaattgagtagtactgaagccatccacgcatttttcgatgaatttcttcaaacattcttgtcagggatattccacgattacgtttagttaataacctcaatgctttctttactcgttgttgcgattgttttgctggacgggcgtaggctccattgtggtctacacccaacgaaaagccaagaaactttaaccgtagcgggctaccgactttggttttatctgggttcactttaactttcaatcgcttttcaagaaactgggtaatgcttcgcattactcgttctccggctcgttgacttttaacataaatgttacaatcatccgcatagcgcacaaagtggtgaccacgtctagtcaactctttatccaactcatttagatagatattcgccagtattggtgacaatggccctccttgtggggttcctttttcactcttagcgaaaagcccatggtctaagactccgctagttagaaacttacgaatgagccttagtgtccatgggtcatcaatatattgttgaagatacttaatcatcaagtcatgattaacattatcaaaataggcttttaggtctaagtcgacaactcttcgataaccttgattataaagatctactacttttgcaatagcgtcgtgagccccacggtgagggcggaagccaaaactattatcagagaaaacacgctcaaagataggtgtaagaatttgggccacagcttgttgaaccattcggtccaccactgttggtattccgagttttcttactccaccattaggcttcggaatttctacccgtttgactggtgctggtttatacttgccctcacgcaaactagcgatcaattccgtcttattttctctgagatatggcagaaggtcattgactgtcatatcgtcaatgcctgctgcccctttatttctcttaactcgcaaataagcctgattaaggttattgcggtccaagactaagtcttggatagtgacactcatacctttaccttcaccataatcggtactacgcgcccttgtgtactttcggttttccaaacctatcctcgacaagcggtcagcttgttgttctgttttctgcgattgtcgcacctgattacacctccgatataagttacaagttattgtcgttcagtccttcatctgattactcagactactatgacctcggctgacttctggcttactcaacgctacatcactgcaccgcttgtttctgtggaaattaaacttattcctcttgtcggaaacgtgtaggccagatctccccgggtaaggatattaactttcgtaccatgtcaccggtagctttactgaaagtaacttcgagtagtgttggactttaacttgtcatgcagtcttatccagttagttccagccttatagctacttcttgttcatcggtgcagtactttgccttagacttccttcagattccacctcgcagtggacacccttgtcctcagctcatggttccgactactacggcccatagcggactctcaccgcctagctaatacccatgccgggcgcacataaataagcgaagttggtttttaaccagcctcgcttatttattttagaaatatattcatattaacaataattttgcactttagctatttgcgataaaatccaataaccgatacataactcgcttattttcagccggaacgccatgctgaataatttcttttccattttggtgaagatcattatggtctaatggatactgatcatcatttacagcaatctcgcgaacattatctgctgtcggctcaaagtggaactgaagtccaataacattaccgttcataacaaagccttgatttttaactaagtcactactaaataataagtctgcttgagctggaacttcaaacatctcttcgtgccaatgcagagcagttaatttttggggaatatcggaaataagatcgctttttagatacaccggcgcccaaccaacttctttatgtggtgccttctttacggcataaccgagtgtcttagcgatctgttgagccccataacacgcgccaaaaattggcttatgagcatccaatagtcgctgaattaaaactcgctcttgcttgatccacgttaagtcgtcattagggctcatgggaccgccaagaataatcaacatatcagtctcatcagcagtcggcaaattaccaaactgatagggatgataaacgtacatctcatgtccgcgatcctgtgaccattcttgaattgttcctggtccttcatttggcgtgtgttgcaaaacattgattctcatcgaatatcctttccgtcgacggcaatgttgtgctaggtatcgcctgcaagtacctaagatattattgttataacatcaaatcatgagcttaacaatagtttttattcccaatattcttcatactttcgtgatgccccggttgcagcatcaacatctgctccaccattatcttcacggcgaaaaataaaaactggctcttctgcctcttgctgataatcaacggtaacaactagtcctgagaagaaccaagcatccgcaaagttaacatggtaattaataccatctttttttatgacgattgttgcctcatcgagcgtcggttctggtttatacccttgcttaggaccatgtttaacattgtgtggttgaattgttttaccataaaattttactccatttccactagcgaggttaaatttttgttggaaccacttgctagcagcatcagtaataattaattgcacttcaatcactccttagtttactatttcttttattttacaaccaagaacctatatttacctatttctgaaattaaactattcgcagtctccctctaactttgtcgtattattatttacacgtatagattaacatctttattaaatagtttcaaaggaatttatttaaactaaaatacatgttgactttataaaaacacgtgttattatagcacctgtaaattaaaaaataacaagtttaaaattaaaggagattgttaattatgaaatatgctgtaactgccgctactggtaacttaggacaagctgctgttaaagaattaaacaagttagctggtgcagaaaatgttattgttattgcccggaacactgataaggctgctaagctctttcctaataatgaagttcgtcaaggagattacgaagataagtcatcaatgatcaatacttttaatggaatcgatcacgttctctttatttcatctcaaccaggtggtaaggttgatcgtgctactgctcatgctaatgtagttgatgcattaaaggaaaacaatattaaatttgttgcctatactagttttaccgacgcacaaaattctactgctgcccttgcaactgaccaccgccttacagaaaatgcaattaaagaagcaggcattgatcactcattccttcgtaacaactggtatcttgaaaacgaaattggtttccttcaaagtggagctgctagttgcgatgcattgtactgggctaacaacaaagctggttgggcacttgaacgtgattacgcagaaggggctgcaaaagttattaccagtgaagatcctcgtgaagtttacgaatttgctggtaaaacccgtacttatgatgaattaggaaaagctctccaagaagctactggcaatgattttactatcaagcagatttcccatgatgattatgtaaaatcattagaaaaagctggcttagatactccaacagctgaacttttcgcatcattccaagacccaatcaactctggaaatcttaataaagaaagtaacgatttagaagaagttcttggacaccccgttactccacttgttgatgctatcaaagaagtccttgcacggtaaaatcatttgttcgtgaaaaccatcgaggctgagagaaaacaaagttttctctcagcctcgatttcttattaattatttttcatcatcttgaaccatctttaagctggagccaaagatctgttcaatcgtaaccgggtcacggtggtcaaagaattgactttcgttcttgttaagactagccattcttttcatatcatcatcggaaagttcaaaatcaaagacatcgatgttttcttccatccggttcttgtggactgactttggaatgacagtaatgccccgttgtaaaagccagcgaagaattacttgaccattgctcttgccatatttagcagcagtctccgcaattgcttcgttagtaaagatatcatgcctaccttccgcaaatggtgcccatgcttcaacacgaatatcttcactttgcgcaaacttaacttcttggtcttgttggtaccaagggttaacttcaatttggttgaccgctggcttaacaggcattgttaattcaagatcctttagttgatcagcgtagaagttcgatacaccgattgcacgaatcttaccttccttttgtgcttcttgtaatgctcgccaagcacccattgtatcgccatatggttgatgaagaaggtaaagatccatgtaatcaaggccaagcttttgcagtgaagcgtcaatccctgatttagcccgcttatagttaaaatcagacacccataacttagaagttacaaagacatcttcacggtttacactactattcttaattgccttgccaactgcttcttcattttggtaagcagcagcagtatcaattaaacgatagccgacttcaagagcatcggtaactgcttgttcagcttgacttaagtctggaacttggaatactccaaatccaagggttggcatttctactccgttatttaattttactgttggtacatttgtcataaaataattcttcctttctgtaattaatcgttgtctatatattaattgctaatttacaaattgaaaattactccctttacatggtagtatacaattggcgcatactattaaggagtggtctaatgattgataattacttgcttgaagaattagtgaccttcgccagtgaaaaaacacttgctaaaaccgctgaaaaacttagcgttacccagccgacagttacccgggggatgcaaaaattagaagacgagcttgggattcaattatttgaccgccagcccaaccggatcgtcctcactgataccggaaaattagctgctgaaaaagctactgaagttctcgccgtcaaccgtaattttgttcaacaacttcaaaattatgctgctcgacaatcagtaattaaaatcgcatcaattgctccgggtccattaattctgcttcgcgtaaaaagtgcatctttttctacacaaattgcgattgacaagaagtttattactcatgaccaaatcaccacttcacttttaaataatgaaaattcaataattatcagcgaccaagagattcagactgatcaaattgaatcgcgttatttagggaccgaaaatctctatgttaatcttgataaatttatgtaccttgctaattcccaacaggtttcttttaaggacttagccggattaagttttgtcgttttgaacgatatcggaccgtggaaagaaattatcaaaaaatatattccaaatgctaaatttttatatcaagaagaatgggccgcgcttactgaaatcacaaaatattctagttttccatactttagtactaatataacaacagttaatccacaacaacgtacgtcaaacgacgatcgagtccgactcccgattaccgatgaagttgcgacaatgacgttttatgctaattaccttaagaaacaaagaaaatccttaatgcccttacttaatgaaattagccaaaactggcctaatttaagttaaattataggcgtttaacttgtttcgctgaaaatccctatttaaaatattaataaaaaatgaatcatggtgactaaaatgacgaaaaaattattactcctttcaaccggtggaactattgcctcggttgtctctgatgaaggactagctccaggcgaatctggtgaagaattaatcaaaatgcttggtcggctggaatatgacattactgttcgtgatattctcgaattagattcatccaatattcaaccagaagaatggaaaattattgccgaaacgatctatgaccatcgtaatgaatatgatgggatagtcgtttcacatgggacagatacgatggcttatactgcttcaatgctgactttcatgcttcaacatataaatattccggttgtgctaactggaagccaagttcctatgaatgtgattcttagtgatgcccctgataacttacgacttgcctttgcagccgctgctaactgcgagccaggagtctatattgcttttaatcgtaaagtaatgcgtggttgtcggagtgttaaagtacggacaaccgccttcgatgccttcgaaagtgtgaatgtcccaccagtaggagaagttacttcagacggcttttccattagggatcaccagcatccccaacctggtaaaagtcaattaaatactaaaatcgatactcatgtttcactggtaaagctcttcccaggatttgatcctgccttgctccatgcaatggctaaaaatggctgtcacggaattgtgattgaagcgtatggtctcggaggaatgacctcgattcggcgaaatatggtcgctgcggttggtgaattaatccgcaatggcattccaattattacttccagtcagtgtctttacgaacgaagcgacttgacaaaatacgaggtcggacgacttgcactactagaaggagcaatcagcgcccgcgatatgacttccgaaagtgccatcactaaattaatgtggggtcttggtcaagggatggatgttaaagaaattgcagacttcttcaatactgatgttgctggtgaagtaactttagattaaacgaataagagacaggatgaaaattttgtttttcacctgcctcttattttttacttaaaaccagctacggatccagttaacaaaccgggtccaccaagactgagcttgttgcttaactgcctgcccgtcttgagaattcaagaattttttcgccttattcatcatatctcctgatgaattctttacattattaatcgtatcagttacgtgcgagctatagtctttacttgaactaattggagcattattaaactgaacaagcgcattgataattggttgttcatgattctttgtttcattgtaaatgtttcgctcttcaagtttctgattaaagattacttgaatttgattttgcgttggggtagttccttgtttcttttgttggttaatttccttagtggtatcaccaaccgcagccatcaacttaccaggatatttactatcatccttattggcttcaattgccccatttgttgcggtcaacatttggttagcagattgagtattttgctcatttaaactaactccatctgccgcaattgctttatagactccggttagagctgactccccagaaacggcccggttagcgctaacggtgatagtaacatccgtaacccccgccatttgcgcaaccatggcgtattgttgagcggttactttagtaatattatcctcaccattaaacttttttacattaactttaatccccgaacctggatcggtggggacaattgctaccgaactaaccatggcggcgttagttgtcgaaccattcggattgatatacttctgataatcactggcagtagcggttaacgttgtaaaattatcatcgactgctagcacattatttaattcattcttctcggcagcccctgctccatatacaacatatgatttatttaacgtatgagtctgggtagttgaactgctactcgtactttcactagttgtttcagccgccaaaactgtggcctggctaactggcactgctaataaagatagtgcaagagtcgaagtaataatgattttggttaacttatttgagcgcacttttttactccttttaaggcaaattaaatttatgttaatgataagaaaaaatccgccaaaatactagcggattttattttctttaccacagtttaattattacgccagtggattgggcgggagcagaaaggcgctcagtcataacttggcttggccgttaattctctccctcgtcttgcagagcttcaccgagttgcttcattcctgccttgatctggtcttcctgagcattggagtagttcaaccggaaggcaccgggctgtgggtcacctgcataaaatgggtcacctggtacaaaggccacgttatgttccagacattgcttaaaaagctcaacagtatcttctactccgggtacttcaacccataggaacattccgccttctggatcagtatatttaacaccttgggggaagtatttctctagcccctctgtcattagtgctttgcgttgcccatacaggtcactaatttgcttgacatgtgcatcaaggtcgttatgcttcagaaattctactacggcatactgggctaagttatctgtatgcaagtctgcagactgttttagtaccgtcagcttattaacaacagcttcatcggctaccacccatcctaaacggaaaccaggagcaagcgtcttggagaaagtccccatatagaaaacgtgtccggttttgtcaaacgacttaactgctggcacatgctgccccttaaaacgaatttcaccataaggattatcctctaacacataaacatcatatttagcggctagttcggccagcttttcccgtcgctttagtgccatggttcggccagttggattttgaaagtttggcacggtgtaaaccaacttagcttccggatgagcctttaatgcttcttctagggcatccatcttcatccccgcttcatccatttctacccccacaaagttggcaccatatgatttaaagacatcaagagcacaaagataagttggctgttcgaccagtacggtatcaccaggattaacaaaggccttcccgactaagtcaagagcttgttctgaacctgtcgtcatcaacacattgtctagctgtccggtcacgttttctttttctttgacacgttggagaaccaattcacggagggccgtcacccctttagcggctccatactgcattacttcttgaccacgttcagcaaacacctggtcaacagcttctttcatcgctttgacagggaaaagctcaggtgccggcaatcctccagcaaaagaaataatctttggatccgccgctgcttttaagattacaccgactgcatctgttccatctgctggcacgcgtttggaaaaattaaacttggtcattgtcgtcactcctcgtaatagatgccacatggcattaacgttatcaatctattctgcctgagctagctggtttgctcgctcttcttcttttttcaatcgttctttgatgtatgttgcggatgttgctagttttgattcttcttccggcgtcaagtccagatgcagctgctccactaccccgtcacggccaacgacagctggatatgaaaggtacgtgccgtattcttcacgataattagaaactggcatttcagttcgcgcatcattcaataatgcgttggttaaccggactgctgccgtggcaacaccataattagtgtatttcttcccttgatatacgaggtagcctccttgacgagcacgttcttctagctcagaaagctttaatccccgttcttttgctagttcagtgaccggtttccccaggacgcggactgtcgaccatgccgtaaattgcgaattgccatgttccccaagattaaaaccaacaacagagcgtgaatcaactttcaaagcttcaccaacccgggcccgcatccgtgcagagtcgagtaaggttcccgtccccatcacgtgttcttttggtaatcccgttaatttttggtacattgaggtaatcacatcacaagggttagtaacatcaactaacttaccgtgaaatccattgtctactaacatctttgctaccaagggcacttgggtccgcgtaaacttaaattcagcaaagcgatcatgatctggcgtatcaaccaactttgatttccctagggctgacacgaccacatcacaatcacgcaattggctttcatcattaacagtcaggttagtatggtaaggcaaattggccattgcatctcgtaagtccaaagcatccgcttgcaccttagcttcattagtatcaaataatgcgaggtcatcgacaaagccaccagcaactaaatagtgcgctaccgttgccccaacgtgacccattccgactactgctacttttctcgtcataataaaactccctttctcttttattgcacaactatgtaaaataattaattctagtcagtcacgtccacactcacagtgccgaagccattatcaaatttggcttcccacttgccggtagttaaatgtggtggtaagaggaaagtacctgatgatactagctgccctgcgcggaatgtcttcccttgttcttcaagctttctgactagccattgcaatgactttaatgggttgccaagcacttcacttgacgccccactatccacttctttgccatcgtggtaaagggtgacatttacatttgctgcatcatcaacggtcttaaacacctcatcggttggtcgttcttgaccatatactacatacccaccaacagcacaatcactcatgacactgaatttatttagatctgggaaccagtcagcaaaacgactatcaggtacttccagcgtgccgcagacagtagtcttatgtaataaatcttccatcgaatcactggcgtgcaagtcagttttagcacggaagccgagttcaacttccactaacggagccatcgtttgttctttgagagagagaacggcaggtgatggtaagaagtgggcatcaacttgttgtccatagagcggactatcagaatcaaacatgtcctgggttttcttactagttaaggaaactttgtacccgccagttgggagtccctttaattcaacgaaacgatcttgaagggcataagctgtattatcatcgctaacgacctctgcccattcatccattaccagtggtttcttgctttgataagcttggaaaagttcttgagcaaaagcttcttgttcttcatttaaggtaacgtttttatttgcagtcataataatatcctccttaggacctgaccgctgttaccaattaattatcggtctaagccggtcaggtcatgttctaatttttcttcaatgttaataatgtctgaaatatcactgtctgccatgaccaccaccacctttaagtatgtctaataaaaaacgccctcctagctctattaagaactaaaaggacgtctatcaacgtggtaccacctttatttacaacacaagggttgcctcaatcaactgcccacaatggcaattaatcggcaagataatggctgctaccagtatgttctactattatttcgacatacaactcgcgagggatttgtcgcaactacctcctaccggtttccaccaaccaccggctctcttaattcagcagaattgacgattctcggtcaacgttttttaatttctcttaattgattattagtagaatatcacgtgaaaatgagaaaagcaagagttaaattaaaaaatcattaaaaacaatattgccatggatcgttattcacaaaatatgcacagtatcaactaatttgactcttcccacaagaatttaatcaattcacggtttacttgactgttattgtggagcttactgtgctgggcattctttccatgaatttcaacttcgcgatatgatttgcacgatcactgactaaatactttaatgatttagcagaatttaccggtacatcttcgtccgagtgactaccatccccaacatccccataaatatttaacacggctgtatttttcggaaaggtctgccgtaaaccaagtaattcgcggtaggcagagtccattttctctagttcgccggtctttggatttatcttagcattttgcgtctcactttgccctaccagtccattatagtgtccagcaatcgctactaagtgggctacttgcggaaagcttttatcatttacattgtcattaatataattgataatttccaagtttcccattgaatggcccacaaggttaatttgcttataatggtgttgtttttctaaagctaataccacattttttacatattcaccaccatgatgatagccctgcgtgtaattatctcgatatgcacttaatttattatcttcaaggttgacttccacaataggattaacggcatttgcgggaattgggcggtttcccttttttgtcaacattcgcccgcacaattgtcttggttacaccggcatcacgggccgcattagccattttttcttcggcatgagaactgctcccccagccatgcacaaaatcgtcggtgttgatgattgaatataatgggttacagcatgtgctcgtgaacttattcctaataggccaactaaaataacagcaaagcctaataataattgagaatactttttcatctaatcttcctttacaaaagcttcatcaaagaattgtttaatcttattaaatggtattttatcaactcgatcataaaggtcaatatgttcacaatcatctacaacatacatctctttaggttcttttgctagcttataagctcgttcagagaaagcacgtgaatgagcatgatcaccaaaaataaaaagaattggccgtggggaaatctcatcaatataagctaatgctggaaattgcatcatggcaaggttagaagtagtagtgaaatttccacgagcatgagcatgaaaaccacgaggaacagcataaaatcgattccattcattagtaatcggatcgatttctggcaatgcatcaacattcgggtaaggtttagttgggaaacttggcttatattcaggaatcccgcttgcataatcttcccagcgctggttagctaactcttctttcattttatttaactcttcatcgcttaggttcatcatcccacgaacatcagtaatatcatacattgatgcggtagcaacggctttaatccgcggatctaccgcagcagctgctagtgcaaagccaccagaaccacaaattccaataaccccaattttgttacgatcaacaaacggaacttcaacgccaagaaaatcaaccgctgcactaaatgattctgcaaataaacctggggaggaaacgcgacgtggctcgccagcagaatctcccatattggcttgatcaaaagttaatacaacaaagccacgctgagcaagttcattaccatacacggctggtccttgttctttcaccccaccatatggcgcaccaataattagagcggggtgcttttctttaatatctaaacctttagcgtaataaaggttaccggctaattctaagccataacgatttttaaaattaatactttgccgttctacgttttctgataatggtgtaatgtatccaaatgacatattattctcctccgatttttttaattactttagcaggaacgcctgcaacaacagtattggcaggaacatctttactaacaactgctcccgctgcaacaacagcattttcaccaactgtaacgcctggtaagattgtagcatttgcgccaagccaggcattttccttaatgaggactgatttcaattcaacgccgcgtcgcttttctggatcaaggggatgatttaccgaaatgattgttacattgggtccgactaaaaccttatcttctaattcaattccgccgagatcagtaaacatcgcaccactgttaataaatacttgtttcccaattttcaggttagctccgtaatcactacggatcggcaaacgaatttcaaccgaggcatctattttttgaccagttacatcattaaggacatggcgaatttctctttgcgatgctgaccgactattcaattgttgaagtaagtcttgattttttaaagccgttgccgtgattgtcgcaagttcttctttttgaatctctttcattttcatccctcttttgcttgaaattattgtttatatcttatcgagtttttataataatgttaaatacttatatttaatgacatactatagttaaaaagcatattggagtgattaaaatggaagtccgtgtactgaggtattttattgaagtagtccaagaaaagaacatttcaaatgccgctaaaagattacatatttctcaaccgacactatcacgacaattaatggatcttgaaaaagaacttgggattactttatttgaacgaggacaccggcaaatcaaacttacccaagaaggctattatttatatgaacgagcgcaagagattactggcctcgttgacaaaactgaaaccgacctgcaatcacaaaatgtcataagcggaacattagatattggtgcaggagaaagtgcagctattcagccagtaatgactgtaattggtgatattatcaaaaagtatccagatgttaagattaacttagtaagtggtgatagcgatcaaatctatcagcgcttaaataacggtaccttggattttggaatcataatgggaccagaaaagctcctagattatcattcaattagattgccgcaaaagaatatctggggaatcttagtccgaaaagatcagccgattgcagaaaaggaaaagattactccggaagatctaaagggtgtccctattattacgtcagctcaatctaaagagcaggatgtgtttcgggtgtgggctggttcattaattgatcagtacaactttattggccagtacaatttaatttttaatgctcgtttattagtcgaaacaggagcgtgccttgcattaacctatgaaaatctgatcaatatcactggaactaatcttatcttccgtcctttaacacctactattacagatcaaaataatctcatttggaataaaaaccgtcaattatctaacgttgcgcaggttttcttgaaccacttaaaggaagtacaagtagtatagaataaagccttttctctcaaacactggcttttatattacttccctatagaactaatatgatctattaccattgtttaaaaagcaaacgaccttatcctaaaacgaataaggccgcccaaacttatatgactaaaactctaaagtacctttcaactactgctgtctataggtcttgaagttcttccatatggtctgctgttttttgatctaattcattatgctcatcagtaaaatcattgtaactaccactaatattagttgcatgattagcaaaatgttttaagtctaagtacgatttatggatagtttccttgtcggatttctttacagaatcatttttctgaattttttgatctaggtcatgcaggtcattaactttactatcaatttcatcaatctcgtcggtatgattactttggatagtatcaacggcagattctacatcaaaatcatcagaattatctattgcatcgctccattcttttccttcttgctttgaaagatcttcaaccttagaaccaagtgtgccgtattgatcaataaaatcttctttatcatccttataatttgatttgttcttttcctgttgttctgtagcttgttgttcttgagcttcatcaatacttccctgcgccattccagcaattagtagtgaaataatcattactataagactaatccaaaaatattttttatttttcttaagagattcattttctttatcttttcttcctttaaaccacctaataccatagacaattgcgactataaacgtaataaaaaacaccaaatcaaataacgttaccaatatctccatataaatatcctcctcaaatatacaaaaatggtcaaccagcgtagctaattgcgtcgattgaccatttagttttaaaactcttacattttaccaaaaattccttaaactgcatatgtttaatacaggaaccaccactaatttgactaatcagataaaattttagattaatagtcaaattcttctttcatatcatcaaaaaagcgctgaacaactggatttcccagcttcagcgcttctctttatttaaaattaagtgagtcaatccagccgtcaatttggcgtgggtcatttaaaattgccccttggttgactttggtatcataaccattttcattaaccgttcgttcaacatagttttgtgagcgatcatagcttgttccaccagaagtagcaaatagtgctaaattcttcccgtttaaatcaagatgatcaatcaccgtactaatcatccgcggcgggatagcccaccaaatcgggtgcccaatgacaatattgtcatagccactaatatctggtaaatcatccttaatatcaacccggctattatgctcgtgctgttcaattgatgtccggcttcgatcatcatgccagtttaaatctgcatccgtatatggttgtgctggatgaatttcggcaatatctgcatttaatttttgagcaatctgttctgcaatcttcttagtagtattggttgcagaatagtataaaacaagggtctttgccattaatgaaggcctcctttatcttaaaacgcagtataaattttaacgtaaaaacgcaatgatggaaaatgcttataattaatccttatctatgctttaaaagtattaatcgttagcgtgaatatcatatgcatttaataacatctcaccaacaccaggcgcatcaggatcatgcattcccttgcctttatcgagggcccgaatttgatccatttcttcatccgttaattcgaagtcaaaaatatcaagattactcttaattcgtgcttcgtgaacagacttagggaagacaacaattccttcttgattttcaaagcggagaattacttgaccagcattcttaccgtatttttcagcaattgctgtgattactggttcatgcagtaagtcagcattaccttgtccaaggggtgcccaggcttcaagacgaacatcatccttcgcaagaatttcccgtaatttcttttgttggaaataagggttaaattcaacttggtttaccgcaggagttacatcaaagttagggacaaacttgttccaaagtttaggtgtcatgttggaaacaccgattgaacgaagcttaccagccttttgtgcttcttcgactgccttccatgcttcgtcaaccgccccatatggttggtgaagaaggtaaaggtcaatataatcaagccctaatttgttaagagaagtttcaatagccttctttgcgtcttcatacttgtaatcttgaagccacatcttacttgttacccagatttggtcacgaggaatcccgctatccttgattgctttcccaacttcttgttcattcatgtaggcagccgcggtatcaatatgacggtaaccagcagctaaggcatccttaactgcattgtatgttgtaccatcagcagggatttggaaagttccaaaaccgattactggaatttcattgccatcgttcaatttgaaagtaggtacattatatatagacattatttttcgtctcctttgcgttaatcattgtctaaatattagcaccatattttctaaactaacattacttgattatcatatcagtatgcccgaaacgtatactaattgagtgaaggatatgggaaattttaaagtaaggatttaaaaacaacctgagaaaaagcttttattttttcaacagcctcgttattttatacgaatattgttacgatatcatggcactggctgcgcgtcgccaaaagactcgaagctaagtcccctgtgccgtgctaaaccccattctatccttagcccctctttgttgaaaaattaattcacactcacctacttttcaaatttaattcttgctcatatcaataattactttacctttattatgtccctgctgaacttttttcatcgcttggggaacctcatctagtgaaaagattttgccaaccgtgggatgaatttgattttcaaccaagatcttgtttgcagctgctaattgttggccattagctgttacgaataaaaattgatagtctattttctttttagctgcttctttttcaatactacgggatgcaagactaaaaagtccttgtttgaacttgctcattttcattcgtttagcaaattccttattaggtattccacgtaaagatacgagtttcccatgaggacgtaaaattgccatctgcttaattgtttcttttccacctaatgtatctattactaaatcaatccctgaaagaacttttgtgtaatcttcttttgtatagtcaataaatttattaaccccgagttgttcgacacgttgctgattttgtggactaccactagtaatcactttgagtccttttgctactgcaattggaatagccattgcaccgaaacttcctgtcccaccagaaataaataatgtctgacctggcttagcttgtaacaattcaagagcctgaattgctgttaaagcagttaaaggaacgccagccgcttcttgattggtaagatattccggtacatgagcaacagcggattgattaaccactaattcttcagcaaatgcaccaatattatttaagggattgcgtccatatacacggtcgcctaccttaaaattagtaacatctttaccagtttgttgaacaagtcctacaaattcatttcccagtgtttgcggtaatttatatgggacaactaatttcaaatcgccccatgctattaaattatctaatggattgacacctgccgctttaacttgaattagtaggtcgtaaggtccaagcggcggcaaagaagcattgctaattagtatttgtggattctttttattgtatttagtaagttgagctactttcataataatcctcacttttttcttatctttatcaaccataacgaattaagaaaatagcgtcaataaagtagctctaacatgtatttcatgcttgctttctagcattatatctttcaatgtcttactaacaagacattaatcgcactattattcaaaggcttttgtcttgccttattttattagttacaaataaaaactgctagctattcattttttgcattattgcctacttaatattggtattttaaattttatctttctaggcttatagtaaaagtaatcaaaattacgattgagaaaggaagattttcatggctaagaaacaaacagctggtcgcgaccaacttggtaatttcgcccctaaatttgcagaattaaacgatgatgtattattcggacaagtttggtcacgggaaagggaattaagccttcgcgatcggagtcttctcaccgttaccgctttaattacaaaaggtgcttttgaacagctcccttaccacatgcaaactgctaagaacaacggcattacaaaagatgaaattgcggaaattattactcaattagcattctacgttggctggccaaatgcttggtccgcattcaacgttgctaaaaaagtatgggatgattaaaaaatcaatttaaaacgtgcctttaatggcgcgttttttattttcggcctattataaaattaattaggaattgtgaggtaattaggatggaagaatttaaagaagcttattatgatggtgaacgtccactttatggtcttcaagatgctcatttagtaaacactacttttggtaagggtgaatcaccattaaaagaaactgctaacttaactctcgatggcgtactctttacatggaaatatcctctttggtattccgatcatatcaaagtaacaaataccatctttgaagaaatgtctcgttctggtatttggtatactaacgatattgaaattactgacagtacaattcaagcacctaaagaatttcgtcgatgtgatgggatcgttcttaataatgttcactttacaaatgctgctgaaacaatgtggaactgtaaaaatattaagatgaaaaatgtatatgctactggtgattatttaggaatgaatagcgaaaacatttatgttgaccatcttgatcttgtcggaaattatgtttttgatggcgctaaaaatgttgaagttcataactcacgcttagtatcaaaggatgccttttggaactgtgagaacgtgacaatttatgattctaagatcagtggtgagtaccttgcttggaataccaagaacattacttttattaactgcacaatcgaaagcgatcagggattatgctatgttgaccacttaacgataaagaattgccgggcattacgaactgaccttgcctttgaattatgtactaatattgatgccgagctaaaaggtactattatgagtattaagaacccaattagtggtaaaatcaccgttgatcacgctgatgaaatcattatggataatcctaaaattgatccaagcaaaattcaaattatccaaagaaagtagagggtgaaaaaattatggaatatgatttcgatacaattctcgatcgacgtcacaccaattctgaaaaatgggacgttaagccaaatgagttaccgatgacaactgctgatatggacttcaaaactgctcccgaaattatgactgcaatgaaaaagaagattgattcaggcgcttttgggtatgaatatcctagtgaagaatactttaatgcggttgcttcttggtataaaaccgagcataacgcaaaagctgatccctcttggatgcgatttgcgactggtgtcatcccttctattactgcctgtgttaattatttaagtcatgaaggcgataatttcttgttaatggagcctatttacaatactttttacaattctatcctcaacagtggtcgtcatgcttttcctacccaactaaaatacgatcattctacgtatacttattctgtcgattgggatgaccttgaagacaaaatgagtaacccgcttaccacgctgatgattttatgtaatcctcacaatcctactggctacgtttggtcacgcgatgagttaatccgaattattaagctagcccaaaagcacggcatcattgttattagtgatgaaattcatggtgatttagtattaacgggtccagactatacccctactttctccttgccagaagattgtcgccagaatgtagttacattagtgtcaactagtaagacatttaatgtggcggcccttcatgctgctacgggaatcgttcctaatcctcttttgcgagaacactttacgcgcgcaatcaataagtatgaagttgcagaaccaaacctcttagcaattcctggaacaatcgctgcctatacacaaggcgcagactggcttcatcagcttaaaaagtatttattaggaaatcgtgaatatcttgttgaatttattaagaaaaatcttcctaaactccacgttgttcctggaacagcaacttatcttgtgtggatcgatgttagtgaagtaaccgatgatagtgctactttagcgcaaaaaattcgtgaaaaaactgggttaattattaatccaggaacctattatcatggcaatgggagccactttattcgcattaacattgcctatccccgtgcacaagtaaaagatggcttagaacgattagctgctgctattaaaaattaaccattaataattattatcagtaattaaaactattttcctcttggcttactaagaaattaatttattttttcgcgcttttaaatatttggacaggaatgagtgagcaccaatatcgcgaaaatcatcattaaacataaaattgtaataaaatcccccgcatgcaactttcacacatgcgggggattttattaatgatcagtttcaacctctaatactttcttcgatccagcatcaatcttaacttctttaactgttcgtccatcttttacttgaacttcccacacagcctgattttctttttcttgttctaatttccattcgataggactacccttcttagttgctttttctgcaatttggctcgcctcatcacgactaattgtcttacttggatctaatgtatatttcttatcatttttatcaagcttttcagatttattggaaattactttaccatccttggcattaactttgaccttatactcattcgcattgtcaaagccttttattgtatatacatatttaccattgtcactttctaattcaacttcattgatttgcttattttgatacttttgattaaatttatcaattgccgcttgttgatcaatcttgatatcactcttcttagctaacttttcatgtttaacagctgcttcgatttgatcatgatggccatgtattgcaactaccccaactgtgcctcctgctcccaacacaatcccgctacaaatacaggcagtaataagcattttcttagtcatttgaggaaatttccttgattttttcttatctgagtttggttgatgatcttgtcttttttcgattttttccgtcatttttattcttcccttcttaactttagttggtaattttattttacgaaataatctgccaactaaaaccaagaacaggtgaaagtatgatgaagaaatcttcatttttgtttaggaagataaactgtaaaaatcgttccaactggttcattgtcgcgaatcataatttttccgtgatatttttcaataatcattttaacaatcgaaaggccaatccccgaaccagcaaccttattggaatgcgattcatcttcacggtagaatctctcaaaaactttttggcgattttcctttgcaattccctgaccttgatcagtaacttttaaaactatttggctatcgtctgccgttaactgaacattaatcgttgaattagttggtgaatatttggccgcattttctagcaaattatgaacaagactttgaaaatcaccttttgttatgcggtaagatatattcggatttaagtcagtaataaatttttgatgatatgcaccttggagtgactcaacttcagcgaaaacaatttttgacaagttaatttctgttagttttttagtctgatgtccttctagaataagcagttcatttattaattgactcatttgctgtgcttcttgatcaatgtactttaatgacttggcaattaattctggatgcttatccccatgccttcttattaggtttacatgtcctaaaattccagcaagcggtgtcttcaactcatgagaagcattcgcaataaattctttttcgcgttgcattgtacgatactgccgtcctagcaaatgattaaaagactgggcaacctttcgtacctctaatggttgttgcggaaccgttaaagttttcaatcgattgctttggggcgtgattgcatcaatttcattatctaaattagtcaatgtttgtgtccatcggcgagctaaacgatgaatgatggggagagcaatgatacttattgcaaggttaattaacagcgtcactatcaaaagccagcacgttaattcgattaaatcatcaacattaattgctactttgacgattcgattatggtctattttttgctgccgtaaataatagactccatgccgggttaactgtagattcttgattgctaaattccgctgatcaattcgcttaaatattttatgggctttgggggagatatatttttgttctccatcagtgatctcaattgcgtcatcgtcttgacgagcaacataagcatttaaaaaagtttcctgattcttgtttctaggccaatcttcttcaattgtttcaattacttcttctgcctgctcatcagcatagcgatatattaaatcagcagcagtcacaacaaaaagaaagttaataattaccaaaattgttgcaaataacgttaagaaaagacgagttaattgccgtgatgcggttattggacgtgtgttgttcattgctcatcacctaatacataaccaatcccccgcacagttttaattaaatcacggtacttacctaacttgttgcgcaaagcacggatatagacatcaacagtattggtctgaccgtcaaaattgtaaccccatatctcgttaagaaggtcatcacgggtttggacaactcctggttctttaatcaaggcagccatgagggaaaattctttaggtgttaaatgaacttgttttccatcaaccataaattgatgtttcagtaaatttatttcaaatggtccaaaattataatcatgtttttctgctttttcttgccctaatcgtcttagagcaaccctaattcgtgctaaaagttcctcaatttcaaatggtttagtaatataatcatccaatccttgatctagcgccatgctaatatcagaggtttgactacgagcagtaatcataataattggaacattactcgactgacgaattcgtcgtagaactgtgagaccatcataaaccgggagcatccaatccaataagattaaggttatttctttctcgttaaatatttccagtgcttctcgcccatcttttgcccagataacttcatatccttctagttctaattcagttattaagaaacttgcaagactttcttcgtcttcaaccaacataatgacagctttcttcattattttgcctccaattatttgtcctatatactattttagctgttttgattgcaggcaaataaaaaaagtttcatatgaaacttttttactgataattagaatttttgttcaagccgatataaatcattcaagaaattagcaacaatatttaattcatccattgaatattttgcggttagtttatcaaccaacttagtctttattatttcatgcatttgatcatgaacttttgctacttttttcccatcctaaatttcaagaataagttagccactggactcaaataaataatactgaccaattgattattggttgatggagctgtgatatctcttggtagaaggccttacgatagatatccattgacgaatgtccattaaacatagctcgtggatagtgattcatccaatcattagtcgctatgatctgagcactactatagttatttatagcttcacctttggtaatctccttgcggagaaaccggttattgatctcattggatccacgttcccaaggggaatacggatcagcatagaaaacatgatcgtgaacttgtgttaactcactaaattctgaaccgttgtcagaggttattgtcttaaagatgcgatagtaagcatctgtgcccattttctggcgtaaatttataaagaactgatttactgcatgcgcagttttaccagcaattttactcgtgatattaactcgtgaaaggcgatcagtcattactagtacaacactgtcattaccgtttttctgtccctgaactgtatctagttcccaatggccaatttcggaccgttggtccgcagtttgaggtcgttgagcaatattaggacctaagcaccttttagcttgcggatgagttcgatgatgcttacgtttaggcttttcaaagaggtctaaattggacgtacgaagcacaccctcattaatccattgatataaagttacaaccgactttgggatcagggtgccatcattcattaaatctcgagccttataaataaccgcttgtggggagtaatggtggtcgtcaaactcaccaagcattagctgatcagctaatcgtaaaaattgctttgaagaataatataagcgacgacgaccagaatggcggtgatgttcaagatatgtggcctgaccagcttcataactatagatgtagtaagaatattcgtaaatcttaccattagatttttgacgacgaagttggcggaccgtaccacggttgagctcgttattaattgtttgatgattaactcctaattggcgaccaattgcgcgattggaaagtccttgcgactttaaagtcgcaatcatcacacgttcttctttagtaagatgagcattctttttatgagtagtcaataaactagtagacatggtatcatttaagtgcgtcatttgacggacatcctttcatataggtttggttcacttaatatgatacctgatgtcacgccgaatggcgttttttatttaccaccaactgggtggctaacttcattctataatccaccacttttttcccattactcgttaatgaataatatattttctttttatcatcaggatgttttactgaaggaagtgatgcaatgtcgatggggcaaatttttaaccaggtcgtcattattttcttactaatgcttttaggggcagttattagaaagctcggatttccccatccgcaatcaattaatgacctaacaaatattacactctactttttatcgccaatcgtaattattaaggcctttgaacagccgttttcgcgatcacgattttatcaattattactattaattgttggtatctttttgacctattttgtttccattttgattgcaaaactactttttcataaagtaaaggaccaaaatattcgtcaaattgcaacttatggaagcatctattctaacaatggttttatgggcgttccattagcacaaggactttttggaagtgtgggtgtcttctatgctgtcgcttcaatgattggttttaatgtcatgtcatggacccagggaattggaatttttcaaaaacggcagcctcatgattggagaacacagttaaagaaaattattttaaatcctaatattattgctattattactggtcttttcctattcattagttcttttcggttgccaaaattaattgctgattttattgattacaccagtccagcgtttactccactatcaatgattgtcatcggaagtaatcttgccaatctaagtattaaaaatatcaaattaccaactgtactctggggaagtctcttcgtaaggaatattttcttcccaattctagggacaattatcttattattattgggaatcaccggtgttccactcttcaccacagtaattcttagtgcatgtccagtagcaggattagtcgttctttttaccttacaatcaaatggggatggacggccagcaaccgtcttaatgagtatttcaaccattttgagtttagtaactattccattagtctattggtttgctagtttgtggtaatgatatatacaatctttgaataaagtattaaatataataagcatttcaaataacagcctccttaatctatgatggaattagatacgtggaggctttataaatgaataaaccatatattacaattgaaaattaaatgcataggatcgggttaaattactgtgattctatgcgtttgtgctttaaaaacaagaaaacgcaagaactctcgcacacactttgggtatttaaaccaaagtagcgaaggggcttgcgtaatgaaatttataaagttgaagtgcaagataaaaaggtatgattccaatatccaactgggatcataccttttattctctagattactgctttttaagtttctttagatagaaaaacaagataaacaatcctattactatacacgccaatgcacctggccataaatctattcgaatgatcaaaataaatatagcatataagattattgctattccttctaagaaaaaacattgtttctttaaacaactaattagccataatattgcacaaagtaaagaagatgtagaagcaataatattcttattgtatgcacaatatacacaaataatgaaaaatattaatacttcaattatattccacttattcttttttaaaaaggtggattatagaatgaagttagccacccagttggtggtaaataaaaaacgccattcggcgtgacatcaggtatcatattaagtgaaccaaacctatatgaaaggatgtccgtcaaatgacgcacttaaatgataccatgtctactagtttattgactactcataaaaagaatgctcatcttactaaagaagaacgtgtgatgattgcgactttaaagtcgcaaggactttccaatcgcgcaattggtcgccaattaggagttaatcatcaaacaattaataacgagctcaaccgtggtacggtccgccaacttcgtcgtcaaaaatctaatggtaagatttacgaatattcttactacatctatagttatgaagctggtcaggccacatatcttgaacatcaccgccattctggtcgtcgtcgcttatattattcttcaaagcaatttttacgattagctgatcagctaatgcttggtgagtttgacgaccaccattactccccacaagcggttatttataaggctcgagatttaatgaatgatggcaccctgatcccaaagtcggttgtaactttatatcaatggattaatgagggtgtgcttcgtacgtccaatttagacctctttgaaaagcctaaacgtaagcatcatcgaactcatccgcaagctaaaaggtgcttaggtcctaatattgctcaacgacctcaaactgcggaccaacggtccgaaattggccattgggaactagatacagttcagggacagaaaaacggtaatgacagtgttgtactagtaatgactgatcgcctttcacgagttaatatcacgagtaaaattgctggtaaaactgcgcatgcagtaaatcagttctttataaatttacgccagaaaatgggcacagatgcttactatcgcatctttaagacaataacctctgacaacggttcagaatttagtgagttaacacaagttcacgatcatgttttctatgctgatccgtattccccttgggaacgtggatccaatgagatcaataaccggtttctccgcaaggagattaccaaaggtgaagctataaataactatagtagtgctcagatcatagcgactaatgattggatgaatcactatccacgagctatgtttaatggacattcgtcaatggatatctatcgtaaggccttctaccaagagatatcacagctccatcaaccaataatcaattggtcagtattatttatttgagtccagtggctaacttattcttgaaatttaggcttattcttttttaaaaattaatcaaaatcatcaaaactccccatgatagtcgaaataacttttccctccgactctaactattctagaagccagttcagcctctaaaataaaatataaagaaaactattccaattaagatcaaaattacagaaactatccatgtgcttggatgaactataaaaagtaataatccatatattatgaaaaatagtgcttgcagatataaaaatttcttccctagattactaattaatagtgaaagtccacaaaagattgacatcgatatcatgccaaaattgtaatcaaatattaaataccccgaaatgtcaatttaagttagaaagaaaatagttgctcatcagtgacgtaagacatgaatacttcatatggagttcgatagcctagtgatttacggggcaggttatttcgcttactcatcagttgggttaccaattcatcaggaagattgcggaaatctagctgtttcgttaagccatcccggcgtaaaaaaccgttgttgttttcgttcagccctcgttgattgggagcaccaacttcggcaaagtaagtgtgaaggtcaaattgattggcaatctcgcgccagccggcgaattcttttccgttgtcaaaggtaatcgatttgaagaagtgccgcgggaatttccgaagccactgacttaagtgttggttaatcgcatcagccgtcttttcgtgcacattgagtacaatttcgaccttcgattggccagccttcccacggcgctcgacatagccattcgggtgccgcttacctcgcatcggcaaggaacggacatcgaagccgaactggccacgttcaaacatccggtaaagagttcgcaggttacaactaattgggcgctcagcgctcccaataatggtatcaggcgtccacccctggtcaattttgtcgttgatataagtgagttcagccagtgacaactgagtacgttttcggccacaacgttgcttattgcgcatatagtgatcttgataatcagcaattgaggcaccggtttccaggtaacgataaacgcgataaacggtttcggcacaacggttgatcatttgggccactcggtacgctttaagcttttgcacgaaagaatgggcgatgattgtcagctcgtttgtggtaagatgggtgtaagtcatttgtggtttcctttcttttgtttaggggtattcaaaagtctaccacaaatggcttttctatttttctaacttaattttacaaacggcgtatcaaaaaaattctctaagtcctttagttaatgaagacttagagaatttttatttaaagatctctcattccatataattatggagaatatcatccgaagctgcctttaattttagataatcgatattattagagaatagcataatcattcgtttcgtcttgtaatcagcgacaaagcaactgttatatccaggaatactcccatttgcgcgaataacgtccccatcaaagtaaaccccaccaaaataggcaacttcttgatgctgcgcctgttggtagtattcattgatcattttgggatctttcagcacctcattatatacaaacttccagtaatcatttggcgatataaaaaggttccctgccccaaagtctgaggaggtcgttacagttacccggtgccaatcaactgttggatccattggttgcggaatttcttttttggaaacctcagaaaaatctttaatttggtgaagatggagcggtttagcaaagttttttcgaatataggtattatagctttgatgcgtttgcttactaataatggctgccaagatttcataatcaacatcttgataatcccatgtatgcgtataatcatacttgagatgtttaagcatataagcaatttgggctttttggcctctaagtggttcaaatggacgatcattattaatcaagccactagtatggttcattaattcccgaatcgtaatatctttactgccatcaatctgcgggtaatacttacttagcgaagtgtcccaatctaattgctttttttgctttaattgataaacagcggttcccgttacaatcttttgaagcgatgccgtgggaaatagtcggtccgcctttacgatctgatccttattcgtggtttcattattttcaatagcaatcgttttccaatctttgccattaactagcatcaccccattaatatgatggtccttcatataatcttgaagttggtgttgcgtttgtttgtcaactatttctgcctttacctttgatggcgtggtcaataagaagatagcaaaggaacaaagcgtcaaaaaaatatacaagttaacttttttcataattataagtattccttccaggcatccgttttcgaaaaaatatctatctgtattatacaaattttatcccccatcttacaaagtagaataaaatctgatttttattactaaaacactttaaattcattcgatttatgttaaaattctaacgtcaataaataaaaaacgcaaaaatagttcgtaaataacgaacattatcaagggagagctagaatgaataacgacgtcgaaaaagttttatatactcaagatcaagtcaatcaacgcttagatgaacttgccaatacacttactgaaaaatatcaagatgaatttccagttttagtttccgtaatgacaggggcaatgattttcactagcgaaatgatgaagcgccttaatttcaagttaaacgttgattatgttgacgtctctagttacgaagaaagttcaaaatccactggaaaagttaaattaattcaagatctttcccacaatattaagggtcgaccagttattattatggaagacattattgatactggtcatacattaaagtatcttgctggtcttttcgctgatcgtggcgcgaagagtattgagatttgttccttacttgataaaccggaccgtcgtgaagttaatattgaagctgattacgttggttttaaagttccaaacgaatttattgtcggatatggcctagactttaatggcctttaccgaaacctgccatttgtcggtgtgttaaagcgttccgtatatgaataatagttaaaggctgagagaaaatgttatttctttcagctttctttttggctttaaacatctaaacgcgatatagtacagttaggctaataaaattgataataattgatttttggtaaaggaggggtaatcattgcttaggcttgactggtgtttacgaatgctcatggctgccttatgtggtggaatcattgggtttgagtgaaaaagtaaggctaaaatggctggaattcggacccatgccctaattgcggtggggggcggcaatggtcatgattatttctaagtatggcttttttgatttactgaaagttacccatagcaattggaacgttgacccatcacggattgccgctcaagttgttagcgggattggttttttaggtgctggaacaatcattaatcgccacgatgaaataattgatggcttaactacggcggctggaatttgggttaccggcgcaatcggtcttgcctatggtagtggtttatacagtattgggattatcggtacctgttgcgttcttttagcagaagttattggaaaatatctagatcagtttgcacttagacaaggtaaaggattctcctgctttattcaattagaaggaaatactgatgatttgcatgcacttattaatcagctaaacaaaaaatattttgaagttccgcttaaatactcgatctatgattatggagacggaaaaatctcctgtcaactttatggtgaattaagatctggcttcaaatcagaaaacatctttactgaccttactgagctgggcaacattaaaaaagttgagttagaataaaaacataggaagtgacaagatggcttataattttagaaaagagtagaaagaattgtatgtccccggaaagaatcccagcctaatcaatgtaccaatgatgaagtatcttgctgtgcggggacatggggatcctaatcaagaaaatagtgagtataaaaaagcaattgaaaagctctatgctgttgcttataccattaaaatgagcaaaaaaggcacctaccaaattccagattattttaattttgttgttcccccactagaaggactatggtggcaagatggtatcactggaattgactacaaagttctatttcattgcaatgattcgccttcccgactttgttactcaagatgtttttgaatgggcaattcagaaggctagcgaaaagaagcagctcgatttacataacgtagaattcctgtcaatgcaagaaggcctctgtgtgcaagtacttcatatcgggtcatacgatgatgaaccggcaacaatcgacaaaatacataaatttattgcggaacaaggtttacaagtagatattaacgatgatcggcatcaccatgaaatttatttgtcagatcctcgccgtaccaagatcgaaaatctaaaaacagtattacgaattccggtaaaaaacaattaaaaacactattaataggtgatcctctattagtagtgctttattttttgccttgaccggtgagtaaatactcactataatgaaataaaaaagtaagcatttactcaccaaacagaaatgagggaactaaatatggtagaccttattcaacttagtcacttgagtaagaaattcggtgaccgtaccattcttcatgatattaatttaaccgtcactcccggtgaaattgttgggttaattggaccctcgggttcgggaaagacgactgcaatcaagacaatgttaggaatggaaaaagctactcaaggaactgcacttgttcttggcaaaacgatgccaaatcgaaaagtacttagtaaaatcggctacatggcgcaatcggatgccttatacgaaagtctttcggctaaagagaaccttgaattctttggcaagatgaagggggtaactggcagaaaactctccgaagaaattatccatgtcagtaaagttgttaatcttcaaaattatctcaatcaacgcgttagtggttattctggagggatgaagcgacgactttcactggcaattgcgttgctcggacagccagaactattaattctcgatgaaccgactgtgggaattgatcctgctcttcgccgccaaatttggcaagaactccttaaactgcgtaatcaaggacagagtattcttatcactactcacgtcatggatgaaacggaacttaccgaccgagttgcgctacttttgcatggggatgtaattgcatttgcttctccaacagaactagaaaagcgatatggtgtaccaacgattgaagatgtctttctaaaagctgaggaggaagaagcatgagaaccctagcaatcactaaacgcgtcttaaaagaactatttcgtgacaaacgaaccttagcattgatgtttttagccccaatcttaattatgtggttaatgaacgtaatgttttctgctagttccaacactaacgttaatatttcaacagtaaatgtcagccagtctattgaacgtaaccttaaaaaagtggatggcgtatctgttacgcctagctcgattgaacacgcaagaaaaaagctaaaagataattctacagatgccatcatcgaatatgatcaagcaaaaaacaaatataatgtgacctatgcgaatactgactcaggaaaaacggtattaacaaaacaggcattgaatgctgcgattacaaaaactaccattagctcattagcaaatggtgttcagcaattacaaacaattgttaaaacgacaaatcctaatataccgattgcaacagctaattctggcaattcaccaacaatcagtaatcattaccaatatggcgatgccgacactggcttcttcgctaaaattgtccctattttgatgggattatttgttttctttttcgtctttttaatctctggaatggccttattaaaagagcggacttctggtactcttgaccgcttgcttgcaacgccggtaaaaagaagcgaaatcgtgtttggctacatgttaggttatgggatcatttcaattattcaatcgactgtaattgtcctagcaactgtttggcttctaaaagtagaagttgtcggaaatgtctttaacgtcattatcattagtgtgctcctagccctcgtcgcccttgctttcggaattttaatgtcaacccttgctaattctgaatttcagatgatgcagtttattccgttagttgttgtgccccaagttttcttctccggtatcattccgctcgactctatggcccactgggttcaatatattggaaagattctccccttaacctatactggagacgctcttacccaaattgtcatgtacggaaagggcttaacgagtcttggcggcgatattttagccttgcttatcttcctcgtcgttctactatggctaaatattattggtcttaaacggtatcgcaaagtataattttattaagaggtgaagcagatgtctcaagttctagcaaattatgaagaacaactcgccaatgctaaaatgcccgcggggaaaaagaaagtccttactactgcattaaagctttttgcaaataatggcttccatgctaccactacggccaaaatcgctaaacaagctggtgttagtgaaggaacaatttataaatatttttcttcaaaggatgatttactagccaagttattgcaacctattttgatggaaattaagaacaacttttttagcaatcttgatgataaaatagacttatcttcattaataagttttattgttactgaccgaattcattttattgaggtaaattttgattttattcgattaatctttcaagaaattctaacaggtcaattaacagataaatcgtatcaagatttctttagtggcaatgatggcgttcttgtcaaactcaaaaaattacaggcaaaatttcctgaaattaatccaaaattaaatccacctcaactcgctcgtatttttattggccctattctcacttatgtcttgcagaataagttattaggcctgccagtaaataacgatgatcttgacattattcaaaaacaaattttagcgaatttaacgcttaaatattaactaaaaaagcatcagaagttgtgacttaacgacttctgatgccttttatgctacaaatcaattatttcattcagtttatacttaaccttcatgttttcccagccatacttaccaaagcgttctttcatctctttaggcgtaaacaacttattgctatcaaatgatgcttcaatcatttaacgatcatgtttaatattttgttgtaattgttgggaattctctttcatctaaaacacctcaatattttttctacttaacatccctgttatattttcacttcaattcttcatatagtggggtaagttgcctaataactgaactgatgtattcctccatattattaacttggtcttttccacgaaatgcaaatttgccaagcaaaaaactggtctttcgtgcatcagaattaaattgctgctgagcatcccgactattgatgtatttagtcagtgacatatgatcagaaaattccatctcatccttatcccaaaggtaccagcgtgtggcatcaatatcattagcccattccggtattttatccagtaattgattgtattcatccggcgtcccttgtcgttgctcactcttataatgttgaaacattaggtagacctgtaactgctttttatcaagcatcaccccaatacaggaattatagtctgctaacgatgctaaacgataagaggcccagtaatgatcacgcaggttccagccgttcgtccaactctcaacgtgaaccttcgcgaattcgcccgttggtagttgactagcgacagtttgatttaccttcttccacacttgccaaacggctttaaacttctcttttaggtctgcaacttcttctggtgaatgattttccttaatcttcttaaaggaaaattctggctggtcaaagattacaaacatactttcagttaatgctgtcattttagctcgcccctttttatccaagaatatcataactaaaaaagctaaactatgactcttaatttacacgaatcataatttagctttatagcttcattaaaacaaattcagcatcaccatataaaagccagttccgaccaagatcgatagtggcatatttcttttccaaaggtgaataaataatgttactaagccggcaacgatttctaataatgccttactaggctcagcaaaagaaatattccgataacaatagattactaatactcccatgattgctgccggaaggaatttccccagttcttccaggtaaggtgataattcttttgactgatcaaaaatcaggaatgggataaagcgggtcgccatcgtgacgactgctgcgattaaaattgaaataatttgttcagttaatgtcattttttctcctcgtgattaagtaatttaatgaaaacagtgcgacaagtgttactaatgtcactaatagaaaaacattcttgttgcaaaatagtaaacaaataattgcaaatgctaaaccaatcagagcatcacgctgagttcgggcatttttcaactgttctgtaaacaacacaataaaaagtgccgtcattacaaaatctaagcctgctaagtttaagttaatcatccccccaaggagtccacctaaacctgccccagctacccaactaaaatagttgaatgcggttatgtaaaaataaacatatgagcgatcaaggctatctggtacttttaacgttgcatttaaggaaaaagactcatcacacattccaaaaataagaatcggctttaactttcctgtattggaatatttttttaacatcgtaatgccataaaaaatatgtcgtgaattaacaagggcagttaaaatgagaacagtcaatggctgaaaactctggactaaaagattaccaattacaaattcgactgatccagcaaaaatggtcgcggccattaataacggatataaaaaattaaagcccagtttatgcatatatatcccatagccggcgcctaaaaatagaaagccaagcattaccggactagttttttgaaaagcgtaacgtacttcctttctcatggacgaattctccctccttaaaataacttgaacttattttaaacaggagtattttatccatacaaggaattaattgtatggattacaatattggagtgataaagtatgcctattaatgatttttcccaccatcagcttacctggtatcctgacaaaaataagctgacgcgaccaatttataaaagtttgctcaatcaactaaaaacagcaattgagcgtggaattcttacacccggaacgaaactgcccccgcaacgcgaactcgccgattatctcgacattaatttcaccaccgttactcgtacttacaaattaagtgcgcaacttggtttaacttatggaattcatggtaaaggaacctttgttaactcaaatggtatcgatccgttaactgccaattctcctttgacccgtaccattgatcttggctttgttgcttcctttgaacagacaaaccacctccttgacaatattcttagcaacaccgtcaagcaaggcgcctcgcaacttctaacctatgactcaccaaccgggcgtccgattgataaggaggctttccagcattatcttgactggcttggcgtgagattaactcctactcagcatatccttattacagcgggaggagaaaactcacttacattactgttaatgaccttattttcaggtggcgataagattgctgtcgacgaatttacctatgccaacctgattgcaaccgcgcaactaaataatctccatttagttgcgataaaaaatgatcaaggcgggatgaatattgaagcattaaaacacgcttgtcaaaacaacaatctagctggcctgtatctcatgccggaatatagtaacccgactggcgctgttctctcgatggctcgccggaaagaaatcgcaaccattgcgcaagaatacggactgaaaataattgaagatgactacctaagttttcttagtaaactcaatccagaacggccgcccaaaataatggaattactaccagaccagacttgttatgtttgcagtatgtcaaaagttcttgcatcaggactccgtgttggttatctagttttcccggcacagctagcccagcaaattaaaaatggtttcttcaacacaacagtcaaaacgtcaactctcaatacagcaattgcatccacggcaataaaagagcatatcgtccaacaaataattcaaaataaagtcaaccttgccaaacaagctaatatcctttttgaacaatatttcccgactgctcctacaaaccaattaaccgactatgccttttttcgtcgattaccgcttaaaagtattcaaaatacagccaagatcgaacaagcccttgctaatataaatatccgttgttttggctctgatcgttttcaaattaacgcttcttcaaatgaccattttctccgtgtttcattgtccgcaaataagtcacttgatgagttagaaacaggcctaaaaagattacgcgagtttttacagaaagctaatttaatttaaaaagtgatgttaagaatttttcctagcatcacctttacttttttgtttagcttattttctaaccgcctcgtaaatcatcccatttcactacataactctcttccctgccatccaagtttcattcacgtggatatttttaagttcactatgagcaactgtaaagatatcatcatttaagataacaaagtccgcggcctttcctacttcaagcgtaccattttcatcaaagccaccaatttttgcaccatcccgagtataaccaagaatagcttgtggaaccgtaattgcttcttctgcgttaacaacatcacaattagcggcctttcttgttacagccgcataaatactataaaacgggctatcaggttctgcccatggcgtacatggggcatccgaactcaagcctaacattgcttgagaattcaacattgttttaacgcggtaagctaatttaaactgggctggtgaaagataatgacgataggattcatcttccgcaaagaaaaagattggttgcgtgactaacgcatagttcattttactattggcaatctctgcaaacatttgatcagtcattaaggatgcatgttcaatacgaaccgatggcattgtggttagccatggcgctatctcttttgttacatcaatcactgtttgaattgctttatcgcccatcgcatgcacagctagttgaagcttattatcacgcgccatctttactgctcgctgaagtttttccactaaagtcaaactaactcccatttttcccgatggataaggatcagtattataggccgtttcgccagaaatactcccatccataaatactttaattccagcaacgcggagtttttcatccccgcttggttgcagtccaacctgcggatcaatttcatcaaagacatagtagatcgaggctttcggaccaaacccttgcttaactgcatcttggtatagttttaaagaagtatatggcttcatccggcccatcatttcaccaattgccacaattccctctttaagatagtgttcggaactattaaccatattagctacgtcgttctcatagctctgtgccgatttagcccgaataagaagttgtgaggcagctatttcgcgcataaaaccagttggtcgtccatcagcaaatcgttcaattttcccaccaaccggatcaggcgtattttcatcaattcctgaaagctctaaggctttagaattgccgacagaagagtgacagtcagaacgataaataaagattggttgcgttgttgaaacagcatctaaatcatcacggttaggactccgatgttctgctaattttgtctcatcaaccccccacccttcaatcggtactgtaccctgtcaagtttacatactaaataataaaaattaattggctttgccgtaacgaaattccgttgcagtaaggtcatttcttttagctgaaataaatgtatttgtaaagtattcaattccttcagccactagtgtttgaagttcatcaagtgtttgtgacttagatgaatgcgctagccaaattgctttaaagtcggcccaccagtgctcgataactgcgttatctgctggtgtgccaggagctgaatagctatgttgactattattgctagttaaatattgattgaacgccttagaagtataagcagctccgcgatcagtatgaataagtggggctaatacaccttcttgtttctgagctttcttgaatacttgaattgctccctcgctagtttctgttggggtaattagccagctaattggaaattgaccatataaatcaagaaccacatgtaaacgaactttataattatgaatattgtaggcgagttctgttgtatcagttacccaaacctgattagctgcttcctgtttaaattgacgattaagtatattttcagcttgataggtttgacgttccttgtcgcgttttcttttagcttgacgatagtcagctttaatcccatgttccttcataattctaataactcgttttttgttgaccaaatatccaagacctgcgcgcttaataagacgagtcattttcccatagccaatactttgcttattagttttctcaatttctttaatcacgcggtttgtaaaattaagttagaaaaataaaaagccatttgtggtagacttttgaatacccatacatcaaaagaaaggacaccacaaatgacctaccatcatcttaccatagacgaactaacgatgatcgctaattttcgtgaccaaggagtaaaagcctaccgggccgccaaacttttgcaccggagcttagaaaccgtctaccgagtttatcgctttctggccgccggccacacgctccaagaatattaccaacactatcgtgaaaacaaggctcattgcggtcggaaggctattcaattgcccactgatgaggtaacttatatcaaagccaaagtggctcaaggctagacgccagacacaattatgggacgcgctgaacggccactcagctgtagtatgcggacactttaccgccttttcgagcggggcaattttgatgtgcggaccttgccgatgaaaggcaagcgtcgccccaatggttacgtagaatggcgggggaaggccggtcaacttggccaaagcattcaccaacgggctatcgactttcccaactttaaccgtgaattcggccaccttgaagccgacaccgtccagggcaaaggacatcagggcgccgttatgactttggtagaacggacttccaaagtcgaagtgattcttaacgtccatagtaagacggccaccagtgtgatccagcacttacaggaatggttggcaaagtttccaccccacttcttcaagtcgattaccttcgacaatgggaaggagttcgctgactggcgagcaattgccaaccaatttgacctccagacctactttgccgaggtgggggcacctaaccaacgggggttaaacgagaacaacaacggccttctgcggcgcgatgggctccacaaaggccgcgatctccgccacctagctgatgaagaggttgctcaaataatgagttaccggaacaacattcctcgcaagtcattgggctatcaaacaccttacgaggtattcatgaagtatgtcactgatgagcaactactttttttctaacttaaattgacatttcgggataaaaaagaggttagagcttaaaattgctcaacctcgtaaagtttgttactcattaaaatgcctgctcatcatataaagggatcgcatttgaccatttatttcagaaatctgtggtaatttacctcattctttgtacccacaggaggtaaaaagatgatagcttgcttgattttcaatataaatatatgcaattacggttcttatatctagatgatcttcaatttgtttttgcgcatatattaataaatcacggccaagatgttgctgtcgataatcttcataaatataaatagctatctgtgccgaatgatcataggcgagatgcggataaaaatactcaagagcacaccaggcgattacttggtcatccattgttgcaacccagattggatgagtattgtcaaactgcataaatcattcacgtcgatcagcaacttcgatcggtgcactctcatcgttgacttgcagcggaattgcttgattaaatatatcgacaatcgctggtagatcatttattgttgctaacctaatttggtaatccatatcaaagcttccttacagtatttttacccactaattattacttatcatagaagtgctgccattctttattaacgttttcgcgagtcgtctttgtcccagtccatgatggaacttttacaaccccatcaatcttactcttaggtacaaatccccagtaacgaccatcgtttgaaacgctccggtgatccccaagaacaaagtattcacctttcggaacttttgtggcaccattattctttaaccaactgttctgaactgagatactacgcagtgtccagtttccagttccggttgttcgttgactcttgctaatgtagtcttgattaatctttttgccgttaacataaatgtttccattcttagagctaacagtatcaccagggagtccaattactcgcttaacataatcggttttaactgatacttgcggatcaatgccattagcatcaaatacaacgacacttccatgatggattttggcagttttcaaacaaaatactcgttcattattttgtaagtttggttgcatggatggtccatcaacccgaacaatttggaagaaaaactgcttaattactaatgcgattattaacccgattagaatgggaataatccaactcattgcttcacgaaatgctttcattataattcctcaatttctttatttaactgttattaatcatacaactagtaataaaacctgaaaagttatttataataaataatatattattttcacatttaataacatcaaaaagatattaaggttcaaagggagcgagacaaaaggcacttgtgacttcgttttcgagccccgcaagcaacaataggcctctaaggttcggttttgccggacgttagaggcctattgttgtactgcgtatttgctttttatgaaagtaacttaacttatgtcacagtcccttttaatttttatttcttttcgacaaagtacttttcgaagttcttttgatagttatgattaatccgttgttccattaaccaccgcatgaaattcatgtccttgtcataatggaaagttgttccatagcggccttctttaataagcttctcagcctgctttttaatttcattatttttagcatactgaaggaaggtcttttttgaaacccccagccataacttatagttgctttcatctttgtttccataaatcgtctcttgatcttttaagctatcaaaaacgtaatcttcaacggggaaagtagcaagttgatagccatttaatgaaacgaagaaactactacgaccttggcgaggattgaggtcaaataccttgaattggccatcacgacggtcatatttcaaatcaaagttaacaaatccagtaaattcaatactttcaaggaaattcttgatattgtcatagatttgttgatcatatgctggcataatcgcaacgtaattaccaacatttgctggattgcaatcttcaagtagcgggtgaccgagacacatcatctttaccttatgatctttatcaacgtaacaattgatggtccgcatattactatcatcaccagggataaattcttgtaaaacgaggtcgccattgtatggactatgctcatagataatctcaagaacttccgctaatctttctggtgtcttaataatataagccttttcatacccttcaaagtttcccttatgccattgcaccgcatcagcagccttcaaagcaattggaaattcaaatggtgatttatagttcttataatcaaggtctggttttaaaatatcggttttagggtaaggcaaaccatacttttcgcagacattgtagaacttctctttatccgttaatgttgctacttcatcataatcagcatacgggcagaacatgtgctgcgaaagttctttacgatttttcgcaactaattcagtatagtcatctccacaactaattaaaacggtcttcttgccttgcttagcaaactcatctgccgctttaattaataccttcgtaaacaattccggtgattgtaattgttcattataatgcaactcgacaatttttgaataacgggttggtgccaatggttggcgagcatataattgcgacttaatcccatatttttcatacatcgaccgcgccattccgtaagcattgaaatcactacctagaatcaatggaacaaaaggttgttcactcattagattcccactcctctttatctttctaaatcattaatataatcacgtgcaatcttcacatcagttaggtaagggacatcttcaccattaatcttctggtaaggatcttcacccttccctgcaaggactacaatatcatcatttccactaccgtcaattgcctttttgatcgccgtttcgcggtccatttcaaattgaatatgtttaaccttatcatgatcaatataagaatctatttcccgggcaatagtcatcggatcttcaaacccgggatcatcagtcgtcaaaattacctcatctggttgttcttcagttaaagcttttccaaaccctggacggcgcgaaatgcctttatcaccggttgctcctaagacaactgttactttaccagcattagtttgtcgttttaagaatgccaagagtcgcttcaagctagcgtaattatgggcataatcaacataaattgttccatgagtattactgttaatcatttccattcgaccacggatgtgaacatgattcaatgtttctacagcatcgttagcactcgccccagctaacccactggcaatgattgcagcgaccgcatttccttcattataatctccagggacactcgttttataacggccatctaagttcaactgctttgctttctcagttaaggcggtcaactcaaattcactttcatgaagatcttctaaatcatttcgatattcaaaatctatttgggcattgtcaggtaattcgatgtttgctcctcgccgtgcaaataagaaaatgtcttctggttgtgtggttgccttagcagtgtaataaacatcagtaaacttttcagtttctgcattgattaagcatttagcagaatttactaataattgttccttacagtgaagataatcagcaaaagttgggtgctcatttcgtccgatatgatctggcgagatgtttaagaaaattccaacatcatactttaaaccataaatccggtttttcttgtatgcttgcgatgatacttccattactaagtgcgtcattccattatcaacggcagcgcgcatatcatggaaaaggtctaaggattcaggagtagtcaaatcagatttaaattcatcttccggcttattgcctaaaatccgatcaagcgttgaaaaaagggcaatatgattagcagtactttgggctaaaatatggtcagcaaaataagccgttgttgttttgccttttgttcctgtaattgcaataatgaacaaatcattttgtggatagtcataaaatgctgcccccagtaaagacattgctttttgttcgtcgttcacgataatagctggcaatccttcgccttctggatattctttttcagccacatacgcaatcgcacctttttctttagcggatgctaggtatttaggcaaaaaatttcctttacaaaagaataaagttcctgattttaccttccgtgaatcataggacacgctagttgcggtaaaatcagtcaaattactaacatgatccaataaatggtgctcgcacaataatgctaaagcaggtgtaatatgcaattccatcttgcaaatgactctccttcaatctaatctgccctatattatttcattttttatcataaaaataaataagggttatcaattaacaaaaaaggagacttagaagagtcctacccttcgccagcctcctttaatatttttctatacttctgttgtagccgctttttgtgcgcggtcaattcccgattcatcaggtttgaagttatcaatgaaatataacttataccacgttaagaaggtgtagattgtccaaatcttacgacgaccatccaccttgccttcgaagttatcatcggcaagttttagaagcttttcttgatcaaagaactcttttacgaagtcttgttcaaataattcacgtacttcttggtaatacttcttttctcgaagccatgcacggactggagttgggaagcccatcttaggccgcgtagcccattcttccggtaaatgccgattagcagccatccggaatgcccactttgtatccttatagttaaagaggtacttagttggtgtcgtttcagctactttcattacctctttgtcaagaagtggtacccggatttcaacagagttagccatactcatcttatctgcctttaaacaaatatcgccaggcatgaaacggtgtaagtcaacatattgcttctttgcgacttcatcgatatctttatcttccatcttatcaaaaagtggattaagaatgtcggcaatacttggtccgcaatcaaattctggttgcaagtagtcagcggcttcttcaggactaaagatgtatgcttgaccaataaaagtatcccgtgctggcgctaagttgcgatacatatgctcttggccgtggaagtgtttcccatctaaccacttagcaaacttataccgacgttcacgaggcatcttctttaattgatcagttacccaacggataaatttaactttcgtattaaaaccataatcaatgtatcccgcaaacaattcatcggcaccttcacctgaaagaagggccttgtagccgttatcctttgctaacttgttcaagaagtataaaggaacaacagatgggttagaatcgggttcatctaggtagtattgaatcattgggaatgcgtggaaagcttcttcgttagtcaacttttcatcagtattcttcaagcccatcttagctgctaattcacgtgcttgtttggtctcatcgtaagtactatcaaatccgattgagaacgtattatctggacgcatcaaagccgttactaaacttgaatcaacccctgcggaaaggaatgagccaaccttaattcctttatctgcaaaggtatgtgccttaacagaattcttaacaacttcgtcaatcttgttaacagcttcatcaaacgtctcgtcttctggctcaaagttttcgtcccagtattgggtcatttcaaactgaccgtctttataagtgaagtaatgcccctctggaagacggtaaacacccttaaagaaagtttcttgagtaactgggtattggaatgtcatgtatggtttaagcgcttctttattaagttccttcttaaagttaggatgatcaagaaatgccttaatttcagacccaacaaagaaagtaccgttcattttagcgtaatacaatggtttaattccaaaatggtcacgggcaccgaacatttctttagtcttaaaatcccagataacaaagccaaacattccgcgcagcttgttaacaacatccttgccccattcttcatatccgtgcaagattacttcagtatcggcatgtgtcttaaatgtgtgacccttactgattaattcttcacgtaattcttcaaaattgtaaatttcaccgttgaattcaatggcttttgagctatcttcattaaagattggttgattaccagacttaacatcaataaaactcaagcgccggaagccaagtgctacatcatcatccacatattgaccttccgcatcaggtccccggtgaataatccggtccttcattttttggattaattggtctttaatttgtggtttttcattatcaacaaatgcaacaatcccacacattataaatttcctcttctttctcttaaattcacggatcacaaaatagttatttaaaattcgttattaaaacttgaacctagattataccatataatgccaaacttaagtatattatccatttgctttaagaaaatcataataaaatctggagagcggagtcattactctgtttctccagattttatttcccaggaaattttatttacgatccttcttggaaaacttcccctgacggacgtaaacacttaagattgcaatatcagcggggttaactccactaattcgtgaagcttgggctaaagtttctggacgaatcttttcaagcttttgacgtccttcagttgctagaccatcaatatcaccataatcgatatcatctggaatccgtttagcttccatccgtttcatccgttcaaccttaacttcctctttcttgatgtaaccagcatatttcaattgaatttcaacctgctcaatcacatgacgatcaagttcctgttctggtgctggaatgaattcggccaacgtttgataatcgaagtatggtcgcttcaagaggtcagctgccgcaattccatcttttaagcgattatccccgtgtgcttcaataaattcgttaaccttatcatcgcttggcttgagcttaatttcttctaatcgtttgatttcagctgcgacttggcgcttcttctcttccattttagcaagccgctcatcactaactaggccaacattatgacccatttccattaaccggaaatcagcattatcatgacgtaaaattagccgatattctgcccgacttgtaagtaaacggtaaggttctttcgttccctttgttactaggtcgtcgatcatcacaccaatatatgcatccgaacgcttaaggacaaatggttccttgccttgtgcccgtaatcctgcattaatccctgcaattaatccttgccccgctgcttcttcataacctgaagaaccgtttgtttggcctgcagtatagagattcttaatgatcttggtttccaaggttgggtgaagttggtacggcgcaactacatcgtattcaattgcatatccaggacgcatcatttctgcattttctaaccccttaattgagtgtacaatcttttgttggatttcttctggcattgatgtcgaaattccgtcaaggtaatattcatccgtatcccggccttctggttcaaggaaaacttggtgccgcggtttatcagcaaaacgaacaatcttatcttcaattgaaggacagtagcgtggcccaacacccttgataacaccagagaacattggagcccggctaagattttcccgaataatggcatgggtcccttcatttgtataagttaaccaacaagataattgttcgctaattggaatataggcactatcaggagtatcaaaactaaagtgatgtggttcctcatccccgggttgttcttccgttacactatagtcgattgtctttccattaacccgtggtggcgttcccgtcttaaaacgctcaagatcaaagccaagttcttcaaggttttccgaaagttttaccgctgacttagagttatttggaccagattcatactgtaattcaccaataatgatctttccgcgcgctgcagttccaacagttagtacaaccgtcttagcgtggtaacgagctcctgtattagtaataacacctttgcagacaccatcttcaacaattaactggtcaacagttgcttgacggagagtaaggttaggttcttcctcaattgtctgcttcattgcacggtgataagcatgtttatctgcttgagctcgtaatgcacggacagcgggacccttaccggtatttaacatccgcatttgaacataggtcttatcaatgttatggcccatttcaccaccaagagcatcaatttcgcggaccacgattccttttgccggaccaccaacagaggggttacatggcataaaagcaaccatttcaagattaattgttaccaacaaggtcttatttcccatccgggctgcggcaagggcggcctcgcttccggcatgacccgccccgacaataattacatcgtatgatcccgcttcgtattgaacggcatcagatgtttgcaatgcttctgaactcttcattcttctattccctactttcctaaacagaattgactaaataactggtcaagcaactcatcttggtaactatccccagtaatttcacctaataattcccaacaccgggtcatatcaatttgaaccaggtctaccggcattccatcattaattccttttaagacatcgcttaaagcatcattagcttggtgaagtaagccaatgtgccgagcatttgtaaccattacattattctggttgctttcaatccccttgttgaagaacatgtgaccaatctgttcaccaagttgatccattccttcatgattaacgattgaagtttcaataacagcactcttaccagctagtgatttcaattcctctaaatcaaccttgcgtggaagatccgtcttatttaagatgatgatccgctgcttatccttggttgcttcaagtaattggcgatcctcgtcagttaattcatttgaactatcaatcaagagaagtactaagtcagcggcgcccaaagctttgcgactccgctctaccccgatcttttcaacttggtcatttgtatcgcggattcctgctgtatcaattaacttcaatggcaccccgttgacattgacatattcttcaattacgtcccgggttgtcccagcaacgtttgtaacgatcgccttgtcttcgtgaagcaaggaattcaataagcttgatttaccaacatttggctgcccgatgatagccgttgctaaaccatctcgcaaaatctttccttgcttagctgttttaagaaggccttggattcgttgttgaatgtcctctgctttttcttttaagagtttcgtcgtcatttcttcaacagcatcatattctggataatcaatattaacctctacctgtgccaatacatccaaaatgtcttgtcgcaaattacgaattaaccgcgacaaatcaccatcaagttggtttaatgcaaccttcatcgatttatctgtctttgcacgaattagatccattactgcttctgattgggataaatcgagacgaccatttaagaaggctcgtttagtaaattcacctggttctgccatccgggcgccaaagctcagtaccaattgcagaatacggttagttgctaacaatcccccgtgacagttaatttcaatcacgtcttcacgcgtataagtgtgaggcgcgcgcattactgaaaccatcacttcatcaacttcctggtccgtatcagggtcaacaatatgaccatagttaatggtatgagttgctactttggcgagatcttttcctttgtagatccgttgagcaactttcaccgcatcatccccactaattcggataatggaaattccaccttcaccaaccggtgtcgaaattgctgcaatcgtatcattctcgctatttgccatcgctactttactcctttctaacaaaaaaagtgctagtccatgcatagtaataaaaatatcactaacatggtcaaagcactttcactactttaacgaatattaaatttataaccgctcatattctaagatcattaccagaaattgtcaacaaataagttagtccttaggcgcaatcacgatactccggtaaggttcccgaccgtgggagtatgtttttacgtggtgattattctcaagttcatggtgaatttgtttccgttcgcgggcgggcatcgggtccataaaaactgctttcccacttgcaactacttccatcgccgccttttgcgctaggttgtgaactgcttcttgacgccgttcacgataattggaagtatcaagttcaacatttacttttgccgctccatgataatccatgaatatattactaagctgttccatcgagttgatccggcgaccgtgcttaccgatcacccgtccattttcctcagtttggagattaattttgagatcatgagcttctaaattaataatccgcggttcaacagcaatacctaattccttaaatactgtcgttagatattcaaccaattctttactagttgcttgaacctttttaagattggcctgttgccgccgcttgatttcagtagggtcgagctcatcttcagctaaatttaagcttgcaggcttttgttctggctcttttgccagttgctcatctttttcttccagtgagggcatcgcaatttctttatcttttattactgcatccacttgcgcttggcgtcgtccaattcctagaaaaccgtgccgcggctgttgaagaaccctaaattcaattgtctgattaacagttggcttcaattgtgtacgggccttttcttttgcttcttcaattgttgttccagtaaaaactgccatttttatcccccgtgaatttaattaatttccactctttaaatttattactaaataaaaaggctcgcaacaactttacttgtcacagccttaataacttatttccgccgactttggtaagcgcgacgttttgctttttcaatcttgcgacgttttgctttttcagcccgttgcttttcttcacgttcacgacgaatcttaaatggattctggatgataagcgtttggacaacttggaaggcatttgttactacccagtataaggtaatagctgaagagaatcccaatgccatgaagaataccataatcggcataaaccacgtcattgtagttgtcattgagtttttttcgggcattgaagccatggataaccatgaactaataaatgtaaataatgccgctagaataggcataatgtagtatgggtccgggtgacctaactgaagccacaagaaagttccattccgtaaggctgaggtccgccagattgcttgataaagagcccacataactggtagctgaaccagtaacggaagcatcgaagcccatggattaactcctgcttctttatagagcttctgcgtctccatttgcatcttttgcattgactcgcgatcacgtgatgagtattttttctgaattgcctttaattgaggagcaagttcttgcgtcttcatcatggtctttgtttggtagaacatcaatggcagtaagatgatccggatgatgatcgtaaagataatgatccccattccatatccgccaaagtgctttgataaccaaatgataaattgtgaacagttatagataatgtagtggtcccagataccagtactatgactagtaattggcttattggagcaagcagctaaaaatagggtcaagctcatgattgctcccaagcttaggaatttttttgttttcttattcaaatcctaatcctcacttttttcatctaacaaatgtgctcgctttaaaacgtgcactaggtttttctttgtttctgccattgataaaccatctgccgctgaccgagcaataaccaagaaatcaacatcagaccgtaattgcggtttcacctctaataatgtttgacgaatacgccgcttaacccaattacgatgcacagcatttccaatcttttttccaacagaaataccgacacgaaaatgtttttgtcctggcttttccatttgatatacgacaaatttgtggttggccacggaattatgggtttcaaaaacccgttgaaactcactttccttttttacgcgatatgattttctcatttgtataatccccagccttaatttaagtagatataaaaatagggccgggcatacgacaactttaacgattcaaattgctcgtcaagctgactgccctgccccacacaataaaaaaagccactataaaagtggccgtggttatgcagataatacttttctgcccttttgacgccgacgtgctaataccttacggccgttactggtgctcatgcgcttacggaagccatggacacgtgcacggtgacgcttctttggttgaaacgtgcgcttcatacaattgcacctcctattaaattcgagtggtttggtttctagagtctaaaagacgatctcttcaaacatactttggtagtataacacacttaccgaaattaataaacggcgaatttttatttaaatttttttgattattaacaaaattagcaaaataatccacagcgttgtgtaaattcataatttgtggacaagttatcaacaatgtttttcagagattatccccagattcacacatgttgataaagttatccacaagtggtctttcaggtgttgataactctctattttactgctatatcaatagtatatatcaacacaattctgtggataagtgataatggaatctccttttccccatttttcacagcaatattattaatttacacacagtgttgtgtaaacttttttattattatccacttggttgtggaaaactttcccatgtaatgataaaataccgtttgtaatttaatactttaggaggaaattattttgactgagctcgattctctgtgggaagcgatccaaaattcatttcgtcaggataccactccggttacctttgacactttgattgctccggcaaaagcaatttctctctctcaaaatcaactggaaatcgaggtgcccactccggtgcatcgcgatttttggcgcaaaaatttaaatacacagcttaaagaattcgctcaacatgaattgggacgtaatattgagccgcattatattttagagggagaatttacctatacaaataaaaaaacagaagatgatccaactccttcttttgagatggacactcctcttaatcctcattacaactttggaacattcgttgttggagaaggaaataaaatggcacacgctgcagcatttgccgttgccgaaagtccgggcagcctttacaacccgctctttatttatggaggggttggtttaggaaaaacccacttaatggaagcgatcggtaaccatatgcttcaagttaatccaaattcgcgtgtcaaatatgtgacgagtgaggattttaccaacgattatattaatgctattcgtaataatacgactgaacaattaagagaagaatatcgtaaccttgatctcctattaattgatgatattcaatttttagccaacaaagagggaacacagctagaatttttcaatacttttaatgcccttcatgatcgcaaaaaacaaattgttatgacatctgatcggattccaaatgagattcccgaactgcaagaccggcttgtatcacgtttcagatggggacttactgtcgaaatcactcctcctgacttagagacgagaattgccatcttgcggagtaaagttgaggaagatcatattgatattggaaacgacacccttaattatatcgctggccaaatcgatacaaatattcgtgaactagaaggagccttaacaaaggttcaagcatttgctaatttaagcggtgagcgaatcacgccaagcttagcatctcaagcattaaagggacttcaccgcgtagccaaaaacgaaatatcaatcgctacaattcaaaaacaagtcgctgatttttataatataactcaaggagatatccttggtaaaaagcgagttaaacaaattgttatgcctcgccaaatcgctatgtatctttctcgagaactcaccgattcctcgttgccaaaaatcggcaacgaattcggcggcaaagaccataccaccgttttacatgctatcgacaaaatcgaggcagaactaaaaaaggatactgacttacaaaacgatattacaaaattaaaagctaaactacgatcataagctgtggataagtataataattatcctcaaacttatccacaagttatcaacaggtggataactcgcaataaagatgtttaaatagttttccacagtattaacaggccctactactacgactatattttaaactattaaatatatttatatacttatacaaaaggactgaaacatatgaattttacaattaaccgatctgcattcattagtcaactaaataatgtcttacgtgccatttcatctaaaaccacaattccaattcttactggattaaagatggtcgtaaacgaagacaacattgtgttaactggtagcaattctgacatcactattgaaagtgttattaatgctaatgatgctgagaacgatttaacaattgaagccactggcgctattgtattaccagcccgcttcttcagtgatattgttaaaaagctgccagacaaaaaagtaactattgaagttacaagtggttttcaagcagatattacttccggttcagctaagtttcaaattaatggccaagatgctgaaaactttcctcatttaccagaaattgaaactaacaaatcagtaacccttcctaacgacatccttaaagaagtaattcgtcaaactgttattgcggtatctaagcaagaaagtcgcccaatccttgccggggtgcatatgacgttaaaagatggcgtcctaacagctgttgcaacagatagtcatcgacttgcacaacggaaagtggtcctcgaaaacatcgataacagcatagattttgatgtgattattcctggaaagagcatggaagaactttctggaatgattagcgatgtccatgaagatgtacaaatgcaagtaaccgaaaatcaagtattgtttatttttggtaatactcatttctattcgcgattactagaagggaactatcctgaaacaagccagttaattccacaaactgctgatacaacagttgaactagaagctgggacatttctatcatcaattgagcgtgcttcgcttttatctcatgaaagccgtaatgatgtggttaagttaagtctaaagccatcagaaagtgttgtccgaattagtggtgattctccagatatcggtaccgttgaagaaaaggtagtcacgtctgctcttgatggtaatgatcttgaaatctcgttcaatcctaactacatgaaagatgctttgcgttcttttggtcaggcaacgatcaagatttcatttacttcaccattgcgaccatttaccttggtgccaacagaagatcaagaaaactttgtccacttaattacaccagtacggacattctaagaaaggtcttatataagttttataaaaaagagactacagaacgttttgttttgtaacctcttttttatttgccatagattaaattttattagtattgctagtttatattcagatttttgaccatagagcaaatttaaccgaattttgataaaaaaggctaaaataagttaatgcgctcagaaaggctaataacgcaaaattaaatcaaataatgtggtataataaaattacaaaagtaggtgaaaaaaatggaagaaaagtcagtgttgattgatagtccatttattacactcggccagttactcaaagaagaggggattattcctactggcggagcagctaaatggtttctaaaagaaaatactgtattagtaaatgatgagccagatgatcggcgaggacgcaaattgtatcccgaagataagattcaaattcctgaccaccaattacttgttattaagggtaagtagggataagcatgattctgacggaattgcatttacatcactttcgaaattatcaggatctaaccgttcacttcaaccctggagtgaacgttttaattggtcataatgcacagggtaaaacgaatatgctagaggcaatctatgttctttccctgaccaagagtcatcgaacaagtaatgaccatgaacttattaattggcaagaaaaatcagctctaataagtggcacagtagagaaaagtattggcaagattccacttgaattacaattctcaagtaaaggaaaaaaggcaaaggtaaatcatttagaacaagcgcgattatcacagtatgttggtcaactaaatgcaatattatttgctcctgaggacttgtcgttggtaaaagggtccccagctttacggcgccactttatggatcgagaatttagccagatgagtagcaagtacctctacaatgcaggccaataccgcacactcttacgacaaaaaaacaaatatttaaagcaactaaaatataagcaacaaactgatcgcgtccttttaggagtcctatctgatcagcttgctgcttttggtgcggaagtaattattgcccgtcaacattttttaaagcaccttgaaggatgggcagctgatttacatcaagagatttcactgaataaggaatcattacagcttgaatacgttaatcaattaaaggttaatgatgagactactgctgaagaggcttatcaggccctttttaaattatatcaagactacgaacagcgtgaaattgagcaggggacaacaatttacggcccccatcgtgatgatatccgctttctggtaaatgataaaaatgtacaggcttttggatcgcaaggacaacagcgaacgacagcactatcagtaaagctagcagagattgatttgatgaaagagcaaacaggcgagtatccattattattattggacgatgtgttatcggaactagatacaattcgacaaacacacctgttaacagccattcagaataaagttcaaacatttttgacgacaactagtttgagtgatgttgctcgccagctaattaatgaacccacgatttttgaaattgagcacggcactttgaataaggaggaagtaaagtgagcaacgaacaacaaaaagaaaccaagatggaattggctagcgaatacgatgctagtcaaattcaggttttaaagggattggatgcagttcgaaagcgtcccggaatgtacattggttccacttcagcccagggacttcatcaccttgtttgggaaattgtcgataacggaattgatgaagccttagcaggattctgtgatgaaattaatgttgtagttaatccagataacagtattactgttaaggataatggtcgtggaattccaattgatacgcaaaaagaaactggaaagtcagccttagaaacggtctttactgttctgcacgccggaggaaaatttggcggcggcggatataaggtttctggaggtcttcacggggtaggggcttctgttgtaaatgccttatctactgaattagatgttaaagttgctcgtcaaggtaaacgttactacatggattttgatcatggtcatgttaagtctgcaatgaaggtaattgaagaaggacttccagaaactgagcatggtacaaccgttcactttaagccggatccagaaattttccgtgaaacaacgacttacaatattaaaactttaactgatcgtttaagagagttagctttcttaaataagggacttaaaatcacgatcgaagacttacgagaaacagatcatgaacggaaagaattccattatgaaggtggtattcgtcattatgttgaataccttaatgaagatcaaaatgttttatttgatccaccaatttacgtggaaggtaaagaaaatgatattactgttgaagtttccttacaatatacagattcatatcgtagcaacttactaacttttactaacaatattcatacttatgaaggtggaactcatgagaccggatttaagatggctcttacacgcgttattaatgactacggccacaaagcaggtgttttaaagtcgaatgagaccttatcaggagatgacgtacgggaaggtttaactgctgttgtctccattaagcaccctgatccgcaattcgagggacagactaagactaagttaggaaattcagatgcacgaacagcgactgaccatgtctttgcggcaacatttaaccgattcttattagaacacccagacgaagcgcggcaaattattgaaaaaggtcaactcgcttccaaagcaagagtggctgctaaacgggcacgggaagttactcgtaaaaagagtggtcttgaaattagcaatttgccaggtaagttagctgataacaccagtaaggatcctgaaatttcagaattatttattgtcgaaggggattctgccggtggatcagcaaagcagggacgttctcgactcacccaggcaatccttccaattcgaggaaagatcttgaatgttgaaaaagcaacccttgatcgagttctagctaatgacgaaattcgttctctatttaccgctcttggaacaggttttggggatgactttgatattacaaaggctaattaccataaattgattatcatgactgatgcggatgtcgatggtgcccacattcggacattactgttaaccttgttctaccgctttatgaaaccaatgattacgcatgggtatgtttatattgcccaaccgccgctatatcaagttcggcaaggtaaatttgtaaaatacattgactctgatgaagaactagagcaggttgtaagctcactgcagccaagtcctaagccagttattcagcgttacaaagggctaggtgaaatggatgctgagcaattatgggaaacaacaatggacccagaaaatcggcacctattacgagtaaaactagacgacgcagaacaggctgataagattttcccaatgctaatgggaaccaaggtcggaccacggcgcgactttattgagcaaaatgctaagttcgttgaaaaccttgacctgtaattaactgttgtttactgctaacgcaaaaaaggaggaacgacattggctgaacaagatatgcctaatcggatcacggatgtaaatcttacgagtcagatgaaaaactcattcttggattatgcaatgagtgttattgtttcacgtgcgcttccagacgtccgtgatggattaaaaccggtacaacgccggattctatatggaatgaatgaattaggggttactcccgataagccttacaagaagtcagcccggattgtcggggatgtaatgggtaagttccacccacatggtgactcttcaatttatgaaggacttgtgcggatggctcaagactttagttatcgttacatgcttgttgatggtcacggtaacttcgggtcagttgatggtgatggagcggccgccatgcgttatactgaagcaaagatgagcaaaattgcagttgaaatgcttcgggatatcaataaaaataccgttgatttccatgataactatgatggtactgaaaaagaaccggatgtattaccagctcgttttcctaatttattagttaacggtgcctcagggattgccgtggggatggctactaatattccaacccataatttaggtgaggtgattaatggcctgcatatgttaatgaataaccctgatattacaacggaaggactaatgaaggctattcctggtcccgactttccaactggtggagtagtaatgggtaagtccggtattcgtaaagcttatgaaaccggtcggggaactattattgttcgagcaaaagttgatattgaagaacagaagaatggtaagcaacggatcattgttcacgaaattccatacatggttaataaggcaaagttaattgaacgaattgctgaattagctcggaataaagatattgatggaattactgatgttaacgatgaaactgaccgtgacggaatgcgaatcgtaattgatgttcgtcgtgatgccagtgctgaagttatcttgaataatctttacaagatgaccttgatgcaaacaacttttaacttcaatatgctagcaattgttaatggggctccaaagattttaagcttgaaacaaatcttgcaatattatctggaacaccaggaatcagttgtacggcggcgaacggaatttgaattaaagaaagcccagaatcgtgcgcacattgttgccggattgcggattgctttagaccatattgatgagataattaatattattcgtaattcacaaacaagtgaagtagcgaaaaatgagttgatgaataattatggtttatcagatcgacaggctcaagctatcctcgatatgcggttagttcggttgaccggtctagaacgggaaaagatagaggatgaataccaaaaattaatggcagcaattgctgattacaaggatattcttgctcatcgtgaacggatcaatcaaatcatttatgacgaattgatggaaattcaaaaacgttttggagatgaacggcggactgaacttcaagttggtgatattaccaatattgaagatgaagacttaattgaagaagaagatattatcgttgccttgacccacaatggatacattaaacgtcttccagttgatgaatttaagtctcagcatcgtgggggtcgtggtgttaagggaatgggagttcataaagatgattttattgaacaactaatttctagctcaactcatgatatgttgctcttctttactaattcaggaaaagtatactcaatgaaagggtatgaagttcctgaatatggtcgggctgcgcagggaattccaattattaacctgcttggaattaataataaagagaagattagcgctgttatcaatgtttcacatgaaactaacgatgatgataaatacctcttctttactactaagctaggaacagttaaacggacagcagtaacagagtttaagaatattcgaagtaatggattaaaggcgcttaatctccatgaaaacgatgaattgattgatgtagaagttattagtgaagatcagccaatgattattggtactcataatggatatgctcttagctttaaatcatcagttgttcggtcaatgggacgaagcgcggctggagttcgtgggattcgtttacgagatgaagactacgtaattggcgctgcccctcttaattctgatagcaaggtacttgtaattagtgaaaatggttttggaaagcaaactcctgcttctgaatacccaatcaaaggccggggcggattaggagttaagacagttaatgttactgcaaagaatggcccgctggttggtttaacgactgtcaatggtgatgaagatatcatgttagtgactgaccagggagtaattattcgttttggcattgaaagtgtatcgcaaactggacgatctgcggttggtgttcacttaattaagatggataatggtgcccgtgttgctacgattgcaaaggtggataaagaagtcgatgaggagactgaagaagtaactaataattcctcacaagaagaaaatcaaccaacagaaaattaaaaaaataaagtgagaaagtagatattttacgtatatatagttatagtgaccgcaacatttaggatttcttgttagatgttccttgttttaaatagaattttatgctatattttatgtctgtgagtatacgtaatgacgtctactttccttgttcttctcaaatagcgagaagagccagagtccataaggaggtgtaacattcatggaaacacgcaaatatgaaattacttacatcattcgtcctgatatcgaagaatctgcaaagagcgaattggtagaccgattcgacaagatcttggcggacaatggtgcaactatcgctgactcaaaggattggtcaactcgtcgttttgcttacccaatcgctaagtacactgaaggtacttaccacgtggtaaacttaactactgattcagaccaagctttaaacgaatttgatcgtttagctaagttcagtgatgatatcctacgtcacatgattgttaagcttgatgcttaattaatttgtcaataaagtaaagagaggagaaagatctatgcttaatcgtgcagtcttaactgggcgtttaacaagagatcccgagttgcggtacacaaccagcgggacggctgttgtttcatttacgttagctgttgatcggcaattccgaaaccaaaatggtgatcgtgatgctgactttatcaattgcgttatttggcgtaaatccgctgaaaactttagtaactttacgcataagggttcacttgttggaattgaagggcgtattcaaacccggaattatgaaaaccaacagggtaaccgtgtatatgttaccgaagttgttgtagataactttgcattgttagaacctcgtcaaaatggtggtgtgaaccaatcaggcgttcaacagccatttaacaataaccaacaatcgtttggtgctcaggctccacaatatggcagtcaatcacaacctggaaataatgctcctcaaagtaatccgtcaccaagtatggacaatggtttcgatcccaatcaaaatgctggcaaccagttccctggaagtagtgatgatggtggtcaatccattgatttagctgatgacgaattaccattctaaataaatttttactcagaataggagggtaatttcatggcacaacaacgtcggggcggacgtcgtcgtcgtaaggtcgacttcatcgccgcaaaccacatcgaatacatcgattacaaagacactgatttattacgtcggttcatttctgaacgtggtaagatcttaccacgtcgggttactggtaccagtgctaaaaaccaacgtaagttaactatcgctatcaagcgtgcacggatcatgggtcttttgccattcgttgcagaagactagtttccactagtaatattaattaaagagacctttttataggtctctttaatttttaaatgtgcgcccggcatgggtattagctaggcggtgagagtccgctatgggccgtagtagtcggaaccatgagctgaggacaagggtgtccactgcgaggtggaatctgaaggaagtctaaggcaaagtactgcaccgatgaacaagaagtagctataaggctggaactaactggataagactgcatgacaagttaaagtccaacactactcgaagttactttcagtaaagctaccggtgacatggtacgaaagttaatatccttacccggggagatctggcctacacgtttccgacaagaggaataagtttaatttccacagaaacaagcggtgcagtgatgtagcgttgagtaagccagaagtcagccgaggtcatagtagtctgagtaatcagatgaaggactgaacgacaataacttgtaacttatatcggaggtgtaatcaggtgcgacaatcgcagaaaacagaacaacaagctgaccgcttgtcgaggataggtttggaaaaccgaaagtacacaagggcgcgtagtaccgattatggtgaaggtaaaggtatgagtgtcactatccaagacttagtcttggaccgcaataaccttaatcaggcttatttgcgagttaagagaaataaaggggcagcaggcattgacgatatgacagtcaatgaccttctgccatatctcagagaaaataagacggaattgatcgctagtttgcgtgagggcaagtataaaccagcaccagtcaaacgggtagaaattccgaagcctaatggtggagtaagaaaactcggaataccaacagtggtggaccgaatggttcaacaagctgtggcccaaattcttacacctatctttgagcgtgttttctctgataatagttttggcttccgccctcaccgtggggctcacgacgctattgcaaaagtagtagatctttataatcaaggttatcgaagagttgtcgacttagacctaaaagcctattttgataatgttaatcatgacttgatgattaagtatcttcaacaatatattgatgacccatggacactaaggctcattcgtaagtttctaactagcggagtcttagaccatgggcttttcgctaagagtgaaaaaggaaccccacaaggagggccattgtcaccaatactggcgaatatctatctaaatgagttggataaagagttgactagacgtggtcaccactttgtgcgctatgcggatgattgtaacatttatgttaaaagtcaacgagccggagaacgagtaatgcgaagcattacccagtttcttgaaaagcgattgaaagttaaagtgaacccagataaaaccaaagtcggtagcccgctacggttaaagtttcttggcttttcgttgggtgtagaccacaatggagcctacgcccgtccagcaaaacaatcgcaacaacgagtaaagaaagcattgaggttattaactaaacgtaatcgtggaatatccctgacaagaatgtttgaagaaattcatcgaaaaatgcgtggatggcttcagtactactcaattgggaaactaactgactttattcaacgccttgacaagtggttgagggcccgaataagacagtatatctggaagcaatggaagaagcttaaaactaaggtaactaacttacagaagctggggctgtcccagcgtgatgcatatgtcttcgctagtacccgcaagggctactggcgaactgcacacagtaagaccttgagctattctctaactaatagaaaactggaacaactcggacttatgaatatgtccaagacgctccagtcaattcaatgtgattaagttgtcgaaccgccgtatacggaaccgtacgtacggtggtgtgagaggtcgataattgaactaatcaattatctcctactcgattatagaaaaggagtgactctaagatgaaactaaataaatatattgatcatactttactaagtcccgaagcaacagaagcacaagtagaaaaagttattaagcaagcaattgataatcattttcatactgttatgattaatccatactgggttgctaaaactcataaagcattagaagaaactgatgtagtaacagcaactgttattggttttcctcttggagccactacaactgcaacaaaagtttttgaaactgagtaagcgattaaagatggtgttgatgaagtcgatatggttatgaatatcggcgaaatgaaaggcaaaaattatgctaaagtagctgatgatattaagacagttgttaaagttgctcataatgccaataaggttgcaaaggtaattattgaaacagctttgctaactgatgatgaaatcactaaggcatctaagattgttgctgatgcaggtgctgactttgtaaaaacatcaacaggtttctcaacccgtggagcagcagttcatgatgctgaattaatgtcagcagctactaaagaaactcccactgaagtaaaggcttctggtggtattcatacaaccgaagaagcagaagcaatgattaatgctggagctacaaagttgggcgttagccatagtatgcaagttattggtaaagaatagaataatgtcgaaaatagttcagcggttggtgaaaatcagcctctgaactattttaatgttattatagattaataataaaacataaatgagggattgcgagtggatagtaagcaacaaattaaacaggccgtccaggttagtaaactttactatttagatggcgttacccaagcagaaatcggaaaaaaactaaatttatcgcgaccaacaatttctcgattacttcaatttgcacgcgagaaaaatattgttaaaatttcaataaatgatccccttagcaatattgaagatctgcagcaccaattaaaagaaaagtatcaactaaaggatgtcattattagtactccagaaagcaatgaaacggctgaaattttatcatctttaggtaaggccacggctcgttaccttgataaaaaagttaaggataatgatgttattggtgttagttggggaaggacactggtcagcgtagcacgtcaattgataccaaatgaccgtaaaaatgttcaggtggtctatttgaaaggaacagtggcgaactctactcataataattatgttgtagaggttactaaatgttttaataaatgctaccatacccaggcgcagattcttccgcttcctttaatttttgaaaataagcaaattaaagagatggtgataaaagataaatttattaacgagattttagatactggtaagcggacaagcgtggcactttttacggtagaaacgacggaacaagatgcaacgctatttgaactaggttattttaatgatcagcaaattaaaaccttgcaagagaaagcagccggggaccttgtttctcgctttattgatgaacgcgggaaaatcgttgatgaccagttaaatgatcgcacagttgctattgctttagatgatctaaaacaagctcgggaatcagttcttatcgctggtggaatgaataagttaaaagcaatcaaagcggccttagctggaaaatatgcaaatgtattagtaaccgattcacttgtggctcaacacctattatagttacccattagatgatataatctattgactaagtatttgatgtgatatgatagatttatccaattaataatttaaagctatttttaggaggactagcatgcgaaaaattttcagtcgtgagaactgggagttttattttgaacacccagccgtccgctggaatgtctgctatatagtgcttttaacaatcattgggcttattttagggtttatggataactggattattggactaattgttttagtaatcgcagttattggtggagctattagtattcggcggttaagaaaattattagtcgatgctcatgaatatttaaatgaattaacgtataaagtccaacgtgggcaacaagaagcattactggaaatgcccatgggaatgattatgttaaataagcgtcatgaggttgaatggattaatccatatatggcgcggtattttaatcttgaaattgttgtagggaagccgattgcagatgttgatgtaaaattagcggaattaataaaagatcatgcagatgataagcaaacacaagtagtgacatggcgtgaccatcaatttgaatttttggttcagcatcacggacaggtagtttatttattagatattacaaaatatgaacagattagtgcacaatataaggatgaacaaatcttcattggtaatatttacctagataactatgatgagctgattcaaggaatgagtgattctgatgtctctaatcttcataattacgtaacttcacaaataagcgattgggcagttgctaatcacttattgatgaagatcattgatgatgataactacttgattattggacatcaagcttcattaaaagaacttgaaaaacaaaaattcaagattcttgatgttatccgtgaaaatacatccaagcaaaattcgccagttactcttagcgtaggaattgcttatggcgaaaatgatctgataaaacttgctgatacagcacaaaataaccttgacctcgcgttaggtcgtggtggagaccaagttgttgttcgggctcaagatcaggaggcacgtttctatggtggaaagaccaacccgatggagaaacgaacccgggtacgagcacggatgattagtcaagcattacaagaattaatggctcaatcagaccaattatttgtgatgggccacaccaatccagatatggattcaatcggtgcctgtttggggattcgacggattgcggaaatgaacggtaaagaatgttggattgtgattgatgatgaacatccacactctgatattcaacgtttgatgcatgagattgataattaccagacgattaaggaccatattatttcaccagtcgaagcgttagaaaaagcgacaaataacagtttgttagtaatggttgaccatgctaagcggggaattaccattgctcctgaattatatgataaaatgcaaaacagacttgttatcattgaccaccaccgtcgcggcgaggactttcctgaaaatccattgcttgtttatatcgaaccatatgcttcatcaacttgtgagttaattacggaaatgtttgagtaccaaccacgtgaaggaaaaggacttaacaagcttgaagcaacggcaatgctaacagggattcaggttgatacaaaatcattcaccaagagtgctggtacgcgaacttttgatgcagctagttacttgcgttctgctggtgccgatggtttaatgattcaatcatttatgaaagaaaatccagaaaccttcatgatgcgtaatcatttgatttcaagagcggaaataaatgataaaatagcattatgtacgggtgaagagggacaggtttatgatcctgtcacggctgcccaggctgctgatatgttgctccaaatgagtgggattgaagcttcatttgtaatttttgaacgtgctgataacaagatcggaatttcagcacgctcaatgggaaatgtcaacgtccaggtaatcatggaaaaaatgggtggtggcggtcaccttgcaaatgctgctacacaaatcagtgataaagatattacacaggtcaagcaagagttagttgatattctaactaaacctgataaagagcaagacgatacagaggagtgatcataatgaaagttatttttacacaagatgtacgaggccgtggtcaacgtggtcaaattaaggaagttccagatggctatgctcaaaactacttaattaagcgtggattggcaaaacaagctactaaagcggcgatgagccaactaaagggtcaacagcgtgctgaagaaaaacatgctgctgaagaattagctgatgccaagcggatgaagaagattcttgaagatgataatacagttgttgaattaagcggaaaagccggtacagatggccggatgtttggttcaatttcaacaaaacaaattgcaactgctttacaaaaacaatttgaccttaaaattgataagcgaaagattgagctggcggctccaattaaggcgcttggctacgtaaatgtgccaatcaaacttcatccagaagtcgaagctcaaattcgtgttcacattgctgaaaagtaatgaggattaatagatttaaggagcggtatcgtcatggataatgcaccagtgcaagaagagccacgcgatattgaagcagaaaaagcagttcttggagctgcttttttaagtaaaaacgcgttggctgatgcgatggaatatcttgagccgcaagatttttatcggaaggctcaccaaattatttttgaaaagatggtccaactaaatgatgcggaccagccaatcgatccgttaacgatgaaaaatgtccttgatcaggataatcaaacggaaaatattggtggcgttgcttatattgctgaacttgcaacagcggttccgacggctgctaatgttgtctattactcaaagattgttcatgataaggcgatttcacgacggttgatcaatactgcaaccaagattatcaatgatagctatgccggaaatgataaaattgaagatcaacttgaccgggctgagcaagaaattatgtcagtttcggaaaatagtcgtcaaactggttttaaaagtattagtgacgttttacaagagtcaattaatcatgtcagtgagctctctagtcaagattcagagattactggactttcaactggatatgctcaattagatgagatgacgactggcctgcataaagatgagttggtgattattgcggcacgacctgctgttgggaagactgcctttgttttgaatattgctcaaaacgttgcaactagaaccgataatacggtcgcaattttcagtcttgaaatgggtgcggagtctttagcaaaccggatgctttgtgctgaaggaaatattaacgctaaccacttacggaccggacagcttacgcaggatgaatggcaaagtttatttattgcaactggtgccttgagtaacgctagtatctatattgacgatacaccaggaatcaaggtagcagaaattcgggcacgttgtcggcgcttagcaaaggaaaaaggcaacttaggattgatcgtaattgattaccttcagttgattgaagggagtaatcctgataaccggcaacaagaagtttcagaaatttctcgacaactaaagaaactggcaaaggaattagaagttccagttattgccctatcacagttgtcgcggggagttgaacagcgacaagacaagcgcccggttttatctgatattcgtgaatctggatcgattgaacaggatgcagatattgttagtttcctttatcgtgatgactattatgagcacgatgaagattcggaagataataataacccgggaaataatcaggatgacgatggatcaaatgctagtgaagttgaagtcatcattgaaaagaatcgtagtggtccgcgggggacagttaaattattatttgcaaagtcttataataagttcacttcgatttcctatatccctgaagataataattaaaaactaaatttctaagagggcatttcagtaaaaactgaggtagcccttttagtgcgcttaagacattaaaaatgttttaaaaaaaataaacggtatgatagtaattgaggaggcgtaaacaatgaaccgtcaaggcgtagaattaaaatggcttttattcggaatgtttcttggaagtattgggaatagttttgtctggccattaacaacaatttatattcacgatcagttgcatgagtcattaactgtatcgggaatcgttttactcttttattcgggagcaaatgttgtcggaagttatattagcggaatgctatttgaccgagctaacccgcggaaattaatgattggcgggacactgctagcgacaatcgtaatggctattatgattttcttcaatggctggccgatatatggaattcttttaacagttattggattctttaatggctggatcattacaatggttaattcttttgcgactcgttcaggtcgagatggtcgttatgtttttaatatgttgtattttgccaataacttgggaatggtgattggaactactattgtcggcccgctttatcagtatgcagatggcaatgtttcaccaatgtttttgattaccacaatcctttatacaatgttctcacttgttgttatctttttctttaaggatagtcaacaaacagttgcaaagaccgaagatatggaagctgaagaagagaacaagacagttaatattaagatacctcaagctaacttatggattaactggatcttcttcattgccttagttgtaatctggacaatgtatgaacaatgggcaagtaacctatcagttttcatgactgatcaaggaatctcgatgacaaaatatagtcttttgtggacattaaatgggattttaattgttgttttccaattaggaattacttggcttaatcgctgggttaatcggccatatgcgcaagtatttattgggatgtttacaattggtttctcatttgtcttattactttacgctcactcatatagctggtttgttgcggcaatggtcgttctgacaatcggtgaagccactgctctgccaacaatgcctgccattgtaaacagcctttcaccggttgctgttaagggaaagtatcagggaattctgaacgcattttcttctttaggaaaggcaattggtccgctatttggtggattgatgattgaagcgacctcttatcatatcctctttattatttgtgcgatttcaatttttgtaatggaaataatagtagtctttgttattaagataaaacgtgcaaaagcagttgaatattaaagaagtgattagatgttttataataattttgataatgtccatggtgaagaccgttatggaatggtaggaaaaacaggagatccttttagggaagaatgtaaactagggatttcttgttatcagtgccatgaacagccgttagtaattgcggaaagaaattggatggatacgaataatgatgactcgcaacggtatcaaattgtggtagtttgtgagcattgtggtgctgttgatgaatttattgttaatgatggtcgagaacaccaaattggtaaattaaaacatagtaaataccagccaacagaaaagaatattataaataatggagctgtgaactagaattgttcatggttctttttttaaatccgtttttattaaccaaaacttgagagatttgctatgatggtagttaaaatcaaattaaaagcaatgaggtgaatgttgatgaaaaccaagaaatatcgttacacaggaaaagactttgatattaagacggcaccaactaaggtaaaagattctgctgatgatcttaagaagattaaaaagaagatcaagaaaaatgtaaagtcaatcaagaatgcgcaaaagatgatgtatgcgcggcgtcattatggtgttttagtagtatttcaagcaatggacgcggcaggaaaagatagtatgatttcgcatatttttgcgggcgtaaatccagttgggtttaaggtggccaattttaaacaaccaacaggccgcgaattacgtcatgattatctctggagaatcaatcgtgaattgccaatgcgtggtgatattggtgttttcaatcgatcttattatgaggacgttcttgtttcacgcgttcaccctgctttaattttgcaatctaatattccagggattgagtctgttcatgatgttaataataaattctttgatagtcgttatgaagatattcgtcagtacgaaagttatctaacgcggaacggttacttaattgtaaaattcttcctccatgtatcaaaggaagaacagaagaagcgtttcttagcacggattgatacaccagaaaagaattggaagttttctgcagctgatattcgcgaacgtcaatattgggacgattaccaaaaggcatatgaaaaggcgattaatgctaccgccacaaaggaaaatccatggtatgttattccggctgatgataagtggtattcgcgtttaattgtatctgatattttgacaaagaagattaatagtttgccattagcttatcccgaggtttcgccagaacaagaaatgagtttactccaagcacgaaaagaactaatagcagaagataagtaaataaaaaggacgtccgaatgacgtcctttttatttacttggtttaaagatgtacttgtgagtaaagaagtagattgctaatgtagaacaaagtattagaatgttaaagtttttgtcgggtaaggccaaattctttgcgttgaactgttcaccaaattattaatttactcatcgttattagttaaattagattattcattcaaaaaagcagttttcaaatatatgtttaagtttataaatgcccaaaaattgatttttagtatttatatattaacttctaatgataataacccctgaaaatctattttcaagggttattatgttagtattttagtataataacaccaaaaaatagctttttagctttaaggagggaagataaataatgaaatacataccattatctaaatataagtattttattgaagataagacgaatgacccggcagcaattgaaagtgaatatcagagtcgactgaacggatatacaagccagaagacaactctgtttcctcttcttaactatcgcgatggtgcacagacaagtaaatatccaattttctatcttccattaccggaaattcaaaacctggcggatcagcttaggcgtaattctaatatgattaaggatatctctgtaacgcttccccaagttgcgattaatcaatttttgaattcattattactctctgaaattttctacactaatgatattgaaggtgtaaaaacgagtcgtgttgaaattagtactgttattcaggaaaataaccacccaataaatggtgatgatcatatatcaaagaaaaggcttggttcaactataaaaatgtaccagcgcacacaatcaggaaaaaaagttgaaatcaatgttcttcaagactatagaaaaatctatgattccttgttaaaaggcgaacttaatgaagatcgactgcccaatggaaaaatatttcgtgataagcttcctaatagcgaagtgctttcgatcggggatggcattaaaacagttcatcgaccaccaaccacggaaactgcaatcaaggttgcccttacagctttaattgaatatatgaataatgatgatactccttcaatatataaagcccttgtaactcactttttctttgaaaatacccatccatttcttgatggtaacggtcgaatggggcgttatcttttatcgtcatatattactaacaaatttgatcgctttactggcttttctgtggctactgcaattcataataatgttcagcaatactataaggtatttaaggatgccgatagtgcggaaaatagagctgatttaacattttttattcaaaaattattaatgatacttgttagtcagcaggaaaaagtaattaagattttgagtcaatctcgtgaaaagcttgataaagccaatgaaattattagtcagtgggtcaatgaacaccatcatcaattagctgcaacgtctgatagtttgtattgtaatgttctatatcttcttgcacaatcaaagctatttactaaccagttagatttaggaattaaagataatgatattattgaaactttgaagaagagtaatcgccgttatccaatgacaaagactaaggcagccattgaagaactagaagcacttggcgcaattgaaattgtttctaagcgtcctaaacaacatgtaattacaattttataataaaaaaaaagaccaccgattactcggtgatcttttttatatgatgggcagtcaggggatcgaaccctggacccacggattaagagtccgttgctctgccagctgagctaactgcccatgtctttgacaacataaataataatatcaacttccgatcattttcgcaagtgtttttctgaatttatttaataaattttcaaatccatattttaattaggtgtctaactgttataattaacaataaaattaaaattgggagtaattttatgacattaaataaggataaatttgagcaaatgaaccgtttattgcggaactatatgattaacatgaagcatttttatactgaacttgcccctgaattagatataactccacagcaagcacatacgcttttttatatagaaaaacacgctgggcttattcaacgagaattaggtgaccatttccatttacggaatgctagtgttactagtatggtgaaaaatcttgaacgcgacgggtatattatccggaaggcggatcaagagtcagcacgaattaagcgtatttttcttaccaaaaagggtgaagaaaagactaatgaggttaaagaaatatttgataaagcttatttgcagattattagccgcctcgatgaaagagatattgatgcaatagttaaagggatgactaatattaataacaatctaaaaaaataagttaggctcttgacagttaggtatctatgtgtttaaatattcatcatcattaaaagttagatatttaactgttaggaggcttatgctttgagcagaaataaatttagttttcgaagtttctttagtttaataaatcaattacatccgcagtatattaagctttttgtgggaatcttactaggttttatctccacgggtgctaacctatttgttcctcaactagcgcaaaagttaattaataattttaagagtattagtctaacgttggcaattttaacagttgtaatttttatagcaggattaattacaagtgcgttatcagggttattattaggaatttttggtgaaaatattgtttctaaattacggaaacaattatggcaaaaactacttaaaatgcctgtaaaatattttgatgatgttaaaacaggcgaaatcagttcacgattagttaatgatacgtcacaggtgaaggatttgcttgcctcaacattaccaaatgcaatgacatcgcttttacaattcgttggtgcactggttattatgttagcaatggattggcggatgacattgttgatgtttgtggcagttcctttagtgattttagtcatgctaccagtgatgaatcagtcgcgtaagattggtcgggttcggcaagatgaattagcaaaatttgctagtgattccaccgatgtattgggtgaggtccgattagttaagtcttcaaacggtgaagaacatgaactggcaaagggaaatcgtcgtatcgacaatttatatcatgtcggaagaaaagaagcgttgattaactcagtaacgcaaccaattacaaacatgctcatgatgataatgtttcttgggattcttggttacggagcaattcgcgttatgaatggtgcaatgacaatgggcgccttagtttcatttttaatgtatcttttccaaattattagtcctgttgttgtaattagtcagctctttaataatatggcaaagactagcggagccacggaacgtatccaacaaatcttaactgaaccagaagaatttgttgctgataaagatgaaaaagatattgtgagcgcaccgttgaaatttgagaatgttgattttgcatatgaggaaggcaagccagtcttacgagatgttagttttgaaacccaacccaatgcagtggtagcttttgccggtccatctggtggaggaaagtcaactattttctcattaattgaacgattctatcagccaacaggtggaaaaattttgatcggtgaagagaatatcgaaaatgtagacttagccaagtggcgtgaacaaattggtctcgtaagccaagatgctgcggtaatgccaggaactattcgtgataatttaacttatggattacgaagagaagtctcagatgaggaattttgggatgcattgagaatggcttatgcagatggttttgtcagtgaaatggaagatcagttagaaactgaaattggtgaacgagggatcaaactttctgggggacaacggcaacgaatagcgattgcgcgagcttttctccgcgatccaaaaatcttaatgcttgatgaagctactgctagcttggatgctgaatcggaggcaatggttcaaaaagcattgggagacttaatgcaaggaagaacgacactagtaattgcgcatcgcttaagtacgattgtcgatgccgataaaatctactttatcgaaaatggaacagtatccggcgcaggaacccatcaagaattattaaagacaacaccactatatgcacagtatgttaaggatcagtttaaataaaataaagactgcgaaaagataagattttcgcagcctttattttaagtatgaaaaaagcgactgagataaaatctcaatcgctgtaaacctctgatgggcagtcaggggatcgaaccctggacccacggattaagagtccgttgctctgccagctgagctaactgcccatatcctttaacagaatacttaaacagtttaacctgttattgatcaaatgtcaaatatttttcataagtttttagaaaatatttatgaaacttttccctgtgctataatagaggcactgatatatagcagatttaaagtaattaatcaattaacccaatggagggaatcattgatatggcaaagaaaattttagttgttgatgatgaaaaaccaatttctgatatcatcaaatttaatcttgaaaaagaaggatatgaagttgtcgtagcctatgatggcgaagcagctttagaacaagtagaagcagaaaatcctgatttaattattcttgacctaatgctgccgaagatcgatggacttgaagtggccaagcgggttcgggctaagcataccatgccgattattatggtaactgctaaagattcggaactagataaggtgctggggcttgagcttggggccgatgattatgttactaagccgttctctaaccgcgaactagtagcacgagtaaaggctaatttacgacggcaagcaactctgaaggcaccggcagaagaagaaaataataccgatattcaaattggcgaccttacgattcatcctgaagcctataccgtaactaagcgaggcgaaaatatcaatttaacgcatcgtgagtttgaacttttacactatctagctcaacatattggacaagttattaaccgcgaacatcttcttcagactgtatggggttatgactattttggggatgttcggacagttgatgtgaccgttcgacggcttcgtgaaaagattgaagataacccgagtcacccccaatggttaattacccggcgtggtgttggctattacctagcaaatcctgatcagaattagaggctgaaccattgtgagcagcaagttaaaattttatcaatcgattcgttttaaaatcgctctcgtattcgtgttaattttgatgttaacacttgaatgtgttggggcggtttttgtgcgtcaattagagcatcaaaaccttaatacgtttaagcaaaccattgaattaccgtcttacgttgataattctttagcagagcagctatcacgatcaaatactaaaaaagcaaacaaacaaattaaccaaatcctttcagaagttaataataataatatttctgaaatccgggtggttgatagtaagagtattgtgcggggaacaagcaacgctgataatcggagtgcaatcggtcagaaaacaacggaccaagcaatcaaagcaaccttattaaataataggtcgcataccgaaaatttatacgataattcaaatcacacgcgctactatgtcaatgttattccccttgtggataatagtaacaataacgttgtgggagctgtttacctgcgagctagtctagaaagtgtctacgctaatattaataatattactttggtatatctatctgcggcgatgattactattgtcttgagtttgatcttggcaattattatttcccaggaaattacccgcccaattgaagaaatgaggaaacaaacattacgaattgcccggggagactattctggtcaagtaaaagtattgggaaatgacgagttaggacaattagcaggagcagttaataatctttctgtccgggttgaagaggcacaggagtcaagcgattctgaacgacgacggcttgatagcattttatcccatatgtctgatggggttttagccactgatcgtcgagggaatgtgaccattgtaaataatatggcgttacagttactaggtgtcgaaaatgaagatgatttaattggtaagtcaattattgatgtgttggatattcgtcatgactataccgttcggcaactagtaaatggtgaacagcgcgagatgattattgatatgtcaaactctggcaataatttgatcttaaacgcctacttctcaccaattcaacgcgaatctggctttgtcagtgggcttgtctgtgtccttcatgatgtaacgagccagcaaaaagaagaacgcgaacggaagcaattcgtttcaaacgtctcacatgagttgcggactccattaacaagtgttcgaagctatgtcgaagcattaagtgatggtgcttggcaggataaagaaattgcccctaagttcttaaaggttgttcaggatgagacagaccggatgattcggatgatcaatgacctgttgagtctatcacggatggatgcagggacaacgaagctcaatctggaatacgtaaatatcaatgagttatttaactatatcttggatcgtttcgatatgattattaaaaaagaagaagatccaaaaaagaaaaaatataccattgaacgatactttactaagaaagatttatgggttgaaattgataccgataagtttacccaggtaattgataatattatgaataacgcgattaagtattctccagatggtggtgtaattacaacccgcttactggagacgcataatcatgttattttaagtatttctgaccaaggtttagggattccacgaaaagatcttggacgtatctttgatcgcttcttccgcgttgataaggcaagaagccggaagcaagggggaacaggtctgggactagctatttccaaggaagttatcaatatgcttggtggacaaatttgggttgatagtgtagaaggcaagggttcaacattctatatttccttgccatatgtaccttatgaggaggaagactgggatgatgaagaagctgaaaagtaattggcaagcaatcgccttaacggttgttgtgcttcttagtttattcatttcatggattgtctggaccaacccatttccttttgagggagcacgacacgaaaatttcaataataaccaatcacaacaatatacaccgcaatcaaggggcgatgtttatctcccaactaaagcagttgagacaaatgaaaaaggaactcagaatcaactttatagccctaaagctaatttaattctgagcgtaaaaaaagagttagaggattggaaattaggccggacaaatgttgtcaaacaaaataacagtgatgtttatttgagttatttgcgacggcggaactcgttaatgctgacatatccggatgaggtaccgagctcagtcttcaacgaaacattttcccagtcaattgatactgaccgggttaatcagattaaccatattattatcccgctaaacgggcaacatgagatttacttacttggtgaccaccattatagtgtgtaccgagtacgggtagagcagggaaaatttaaccatattcggcaactcttaaagtcaatggatcgaatcccagttgaccataaaactattaacggagtagcagtaatgatgtatccccggtcctttgagttaccagcattaggatatcaaatcactgcgcaaaacattgatacccttagtgctagtctaatgagtactaaccaacacacaacaattacggcaaatcggaatggcaacgagactacctatacggatggaaccaatcgtcggctgatatttaatcaccaagatggaacgcttaaatacgaaaattaccttagtacggacgatcgggaatcaacaagccagattttcccacacttctataataagttgacgacaattggaattccgcttgataatttgcgctatgatgaggtgagtgagcatggtcgtcggttaaactatcgggcttatgttaatagctttccaattttcaatagtgatggttatggagaagtaacgcttgaatctacaagtagcgggaatgaacgcttctggctaagtctttatagtcttcgagtgccattgccaattgatcaccagatggtcaagcttccatcaagtgcagatgtgattaatcaattacatgcaaccaaccggatgcgtgacatcaaggacttacgtgtcgggtatatttggaaaactgataaagatagtcatgttgtaaagttagtgccaacgtatttcattaagtatcgcggccactgggttgaatataccgagttagaaaagtaggagggttaaagaatgaattttaaacgtattcaatggatctttatccttgcctttttgctttttgatatctttgttggaagttcattaatcttagaaactagatttaccgtttctaatggtcagcaaaatcgccagtcaacagtgttaaaagaaatgcgcaatgactcgattagttatggcgagctttctaataagcagcaaaccggatattatattgctggaaagaaatcctctgatagcggagtcctagagcaagaagccgggaaattacgtaatcaaaattttcgtctttcttcaggaacactaactagtgagtttgataagccaattaaaacaactaaaaataatgagattcggcgtgtcgaccgtctattaaaaaataaaaagatggtaagtttaggaaatcattatcgctataacaaggaattatcggacaaaaatacccttgtttatacgcaaatgctagaaggaaagccgctattttcaaatgatgggcaaattcgttttcggataaactctgactgtgagataacaggttatacgcagacttacttgcaagatgttgaaattctccggcaacggtcaaatacgattagtcagcgccgagcaattacctggttgtataaacataatcaaattcctaataactcccgcattaggtggtcggtgctcagttattctaagctccttaacactactactgatgataaagcagtctatgtgccaacgtggactgttgaaatcaaaactaaaaactcaggagcaattcaacaattacaagttaacgcatttaatagtacagttatgaaggaaacaccagatagtgtgaatacgaactcgttaaataataagtaattgaggaggaactttaagtgacagaaacggatccattacgttatagtatacttgcgagcgggagtactggaaatgtaacttatttggaaacgcgcaaccaccggatcttgattgatgctggtttaagtgggaagcggattgaaaatttaatgaagaagattgatcgatcattaaaggatgtcgatgcgatttttgtaacgcatgaacacagtgatcatacgcatggtgttggtgtcttggcacgtcgctatgggatggatgtttatgccaatgaaggaacctggcaagcaatggccaataaagttggtaaaatcccattagcacaaaagcatattattgcaccaaatactgttaaggacttgggagacatggatattgaaagttttgcggtatctcatgatgctgcgcaaccgcaattttaccaagttcaccacaataataagaccttctgtattattacggatactggttatgtttctgatcgagttgagggaaccatccgaaatgcagatgcctacgtaatggaatgcaatcatgatacagaaatgttgcggatgggtccttattcatggccattaaaacagcggatattaggggatgagggtcacctttccaatgaagaaggtgccgatgcattgatgagtgttgttgggcggcgaaccaaagagattttccttggtcaccgtagtcaacataacaacatgcgttcgctcgcccacttaacagttgcaagtttgatggagcagcatgactttggcgtcgatcatgattttaaattgcaagatgctgaaccagaagaaccaagcaagttaatgacgttataataaagagatcacggtttttatcgactttattcaatgatttttcatatttaaattgtaatttgaagatagtaattctttaacttagtggagggtttaattggtgaataggataaaacaagcttttaaagatcgattgtggctaggcgtaattattgtcggcttatttgctggtcttatcggtggtggaatcgccttaggaattaataacctggtacaacatcatgaagaagtaacaagtacacgagttccagctggctctaataagtctggtggtacgaaggttaataagaataaggctgacttaaacggggaagcgtcccaagcttataagtccgttcaaggagccgttgttagtgttattaataaacaaaaagttcagcaatcaagtgggacgctaggaatttttggttatggcagtagtaacggaagcaacagtgattcttctagtgataataaattagaaaccgctagtgaagggtcaggagttatttataagaagagtggaaattcggcttatgttgtaactaataaccacgttgtcaaaggttcaaacgcactccaagtaattttaagcaatggtaaaaaagttaatgctgatttagttggtgctgattctgcaaccgacttagctgtattgaagattaacgctacaaatgttaagacagttgcatcctttggtaactctaattcgattgttcctggtcaggatgtgctagcaattggttcaccaatgggaagtgaatatgctaatacagtaacaaaagggattatttctgccaaagatcggacattaaaagccgggactgatggaactttgacatcggttatccaaacagatgccgctattaactctggtaattcaggtggtccattaattaatatggcgggtcaagttatcggaattaattcaatgaaacttgcttctgatacacaaggctcttcagttgaaggaattggttttgccattccaagtaatgaagttgtgacaattattaaccagttgattaagaatggtaaaataactcgtccatcactcggaattagtatggtggatcttagtaatgttacttctgatcaacagcaatcagtcttaaaactaccaacaagcgtaaacaaaggggtagtgattatggatgtgaatagtggttcagttgctgatactgctggattgaaaaagtatgatgtcattacaaagcttggtgacactcaagttacagatgcgggttcattaaaggcggccttatataaatacaaagttggacaaaacgctaaagtcacttactaccgtgatggtcaacaacacaccgcaactttgcatttaacaaagagtgctgatacaacatcaactgatgactcacaacaagataataattagtgaattgggagcgagacagaagtcacttttgacttcgtttttcgacgcgaagctagcctctgggagcccccgcaagcaacaataggtctccaacgttcggttttgccggacgttggagaccattgttgtactgtgtatgtgcttttaatgaaagtaacttaacttctgtcttgcttcctttcattaaaagcctcttaattaaaaggggtataatattagttatcaatataaaggatggtgggtaaaatgaataatccacggtttaaatacccagatacaaaggcatttgaatttgtagtacatcgtttagaagaacgcggagtaaacttagacgaacttgcgaagattgtgtatgagacgcaaaaaagttttgaacctgacctaacaataaaagaatgtcagaaatttttgattgatacaatgcataaacgtgaattattaaatagtacaatggtagcccttgagctcgatcggttaaccgaagaaggaaaagtcgatgaacccctagcaagtattatcaaaaatgatgctggtgtatttggggtagatgaaaccctagctttacaaattgctaatatttatggaacaattgggacgacaaactttggttactttgaccgggttaagagtgggattattgccaaatttgaccacgataaggttcatgtaaatacatttattgatgatattctcgcggcgattgtggcggctgtttgtggaaagattgcccaccagtacgcttgattaaaataatctcattgacttttaaataatttatcattaaaataaacataattcgtttagaggagtaaagcaaatgagttatcaaactttacaattaaattatagttggcaaagccggtaactcagggatagctgtagtacagatatgacctgggtttattcacagattatatctgtaccggctgctttatcatgtacaaataaggcctgtacggatttcacgcacgggctttttctatttcactggataaatagtgggatttccgaaacgtggagctcctttttattttgaaaggtggagatagggatgaaacgaattatgggctatattattattggaattgttgtgattggtggttattttggacttttaaggcttcatcaacagaccacaaaaccggtggtagggattttaacgatgatgcatcatccggcattagatcagattcaaaagggggtcgttgccggattagcagaagaaggataccaaaacggaaagaatatcaaaattgaataccagaacgcgaatggtgatcaaggaaacttaaatactatggcaaataaattagtgaatgatcatgcgaaagtaatcgttggtattaccaccccagcttgccaagcacttgctaatgcgaccaaggatattccgattgtgatgggcggaattggtgatccggttggtgccggtttagtaaagaatgaaagatatccagaaggaaacgttacaggagttcatgatgtgaatccgagtgaacagcagattgccttagtaaagaaatttataccaaatattaagaccctaggagtaatttacacatcgagcgatacctcttctgaaagtcagtaccaaacgatggtaaaagcagcgcataaattacatgtaaacttaaaaacttatacaattgcgaatgctaatgaacttaatcagacttcacaaacaatgttgagtaaagtagacgcggttattgttcctagtgacaatacaattgctggatcaatgggagtattggtgaaaaatgcagatgtggtcaataaacctgttttcccgagtgctgatacaatggtaaaagatggtggagtagcttcgattagtcttagccaatacgggcaaggaaaagcagctggaaaaatggcagcacgtattttaaaaggtgaaaaaccaggacagatggcagttaataattaccatcatggaaaaccggttcttaatttaaagcaggcacataagttaggaataaaagttccagcagattttcaacaagaagcagaacaacatggaacagtctttaagtaagataatgggaaaattccgaataataagaaaaattaaagaagataacattcgctaggtaacattccgttgtatatttaccacagattgtgttgtaaatcgttagaaatacgttaaaatgataatgtgaaattgcttgtggataagtcagtggataactaacagtaactttaaagtaattttataaatgttggtatatcaataaaaattattgttcaaaacttatccacaagctgaatatgtgtttgtggataagtggaattctttgtcaacgttctgcaacgacgcttactggcgcaagggatagccaagtcgttgctgaacgattgttcctgtagataactgtggataagtaatttttaagaaaacgcttttttaacaaaaaattaaccgaacattcgggaaaagtaaaaaaatcaacgcaggcctgtggacaactttgtggataaactgtggaaggtagtggatatcttgaatataaaaattattggtgtgggtaagttaaaagaaaagtattttaaagcgggaattgctgaatatgctaaacgacttggacgttattgtaaatttgaaattgttgaggttcctgatgaaaaagcacctgaatctttaagccaagcagaaatggatgaagtaatggcaaaggaaggggaacggattcttgataaaatcaaagatcgcgaatatgtatatgctttagcgattaaaggtaaagaacgttcttctgaagagtttgcaaacgaaatcaataaattaacaacttatggtcacagtgatattacttttgtgatcggcggttcattagggttaagtccagcagtattaaaacgggcagatgcccaaatttcgtttggaggttttaccttgcctcatcaattaatgcgtttagttttaagcgaacaaatttatcgagcttttaccatcatcaatggcctcccatatcataaataaagaatttattgagttttggttagattattatttatcgttgttagcgatggtatagtgtaaatatgaagtgtaatggcataagaattaaaggatttgatttaaaataggcatacgaggttaccaagtaattcttttaggggtaatagcaggaatatgcattttagtgatgcaaggaaaagcaagtgcaatgatagtaaatgaagcacggctgacattgcctaatgaaaaaagaattgagtatgatgaatttgaacggtaccagtttcgggcaaaacagttacgaacttggtggcaagtcaagcgaccaaaatataaaattgattggtcattttatcataagaaacggggatactgggattagctcaggtcctcgtttttcttttaacttttcaaaaaagctattaaaatgaagatattaaaaggaggcaatgataatgaaaaaagttgggattatagtcggcagcgttcgtccaaatcggcggagcatgcaagtagcaaactggttaaaagttcaattaaagaaaagtacaaaggttcaatttgacatcatcgacctaaaagaagttaatttaccgatgatggatgaacctaaaattccttatttgggtttatatgttcacgaaaaaacgcgtaaatggagtgagttagtacaaagctatgatggttttgtgttagtttttccgcaatacaattggggctatccagcagttttgaaaaatgcgattgattacttaggaaaagaatggcaaggaaagccggttagtttagtaacattcggtggacatggcggcttgcaagcacaaattgcaatgaaattggtcgtaaccggcttaaagatggcggcgcttcctgttgatttacaaattaacttgatgccggatgattcaactgcgactgctgatcggaagttgaatacttataatacgcaagcagcgttattaatgactgcttttgaaaatgagttaagctagtttgtgattaaagtagcaaattattgtaggacattaatataaaattggttcaatttgtgaatattatgacaaacatcgtgatattgcagcagattaggcaagattattattacaaattgggcgataatgaacaaaaaatcaaaatgtttctattgcaaaaataaaacgcttgcatgataatggaatcgtattcaaatgccatgaggagggtatttttaatgaatagacaatttgatttcttaatgccaagtgtgaacttctttggtcctggtgttattgccaagattggggatcgtgcaaagatgctcaatatgcacaaaccattgattgttactactgaaggtttatccaagattgacaatggtcctgtaaagcaaaccattgcttcattggaaaaggctggcgttgactatgccgtatttactggcgctgaacctaaccctaagatccggaatgttcaagctggtaaaaagatgtaccaagatgaaaactgtgactcaattattactgttggtgggggttctgctcacgactgtggtaagggtatcggtattgttttaactaacggtgatgacatttccaagcttgccggaattgaaacattgaagaatccacttccaccattgatggctgttaacactactgccggaactggttctgaattaactcgtcacgctgttattactaacgaaaagactcatttgaagtttgttgttgtttcatggcgtaacattccattggtatcattcaacgatccaatgttgatgcttgatattccaaaagacattaccgctgctactggttgtgatgcttttgttcaggctattgaaccatacgtttctgttgaccataacccaattactgatagtcaatgtaaagaagctattcaattaattcaaactgctttaccagaagtagttgctaatggtcacaatattgaagcacggactaagatggttgaagctgaaatgcttgccggaatggccttcaataatgccaacttaggctatgttcacgcaatggctcaccaactcggtggtcaatatgatgctcctcatggtgtttgctgtgccttgctcttgaccactgttgaagaatataacttaatcgcatgtccagagcggtttgctgaattggctaaggtaatgggctttgacactactggtcttaccctttacgaagcagcacaaaagtcaattgacggtatgcgtgaaatgtgccggcttgttggtattccatcatcaatcaaggaaattggtgctaagccagaagactttgaaatgatggccaagaatgccctcaaggatggtaatgccttctctaacccacgtaagggtactgttgaagatattgtaaagctttatcaaaaggcttacgatggcatctactaataattaaataaacacaaagaggctggaaatcagctcagtctctttactgttttacgtattaaactgccagccaaccttacggaggtgggactatgaactagccaagctaattctgtcccctctttttttgtctacttttaattcttaatattttgaatttttttcacaaagttacttgcaagcgtattcttttgaaactataataaaaattattctaagagagaataagaggaaaagagaaaatgatatatttacttgctttaattccagcaattggttggggtgcgatgccattaattactggtaaaattggtggttcaccagttaatcaaatgtttggaatcggtgctggagcttcaattgtgggaattattgcatatttgataacaaaaccaaccgtcagtgtaactgctttttggttctcgctagcgatcggttgtttatggacaattggacaggttggtcagttcatctcgtttaaacatatgggagtttcaaatacgatgcccctttcttcagcatttgtgttagttatgacgtcgtttgtcggcatctttttctttgatgaatggcaaggagccagagcattaagtattgggttgacagcgtgtgtagttgtaattattggggctgttttaacctcgatttcggacggaacatcggataaaaaggtttcgactaagtgggtattatttttattagtaacaacaattggttactgtgcttattcgatttttcctaaaatgccacaggttgctcatgaaagtagtcagggtattttcctaccagaagtattaggaattttacttggttcagtaatttatactatttgttcgggtaacgctaaagcatttaagcaaaaagaacaatacttaaatattttaggaggactttcatgggggattggtaactttgcctatgtttttgttggtaaagctcttggagtagtgactgcttcaatttttggtcaaatgaatgttattatttcaacatttggtggtatcctacttttgcatgaaaccaagaccaagcgagaaatgatatatacagtagttggaattatcctaattgtaattggtagtattttaacagtaattgctaattaattattgaagattttaggtaatatcaataaatgagagaggaaacgcgcaaaatcagctttttaaccgattttacgcgtttttttagtcttatattatttcccaggttatattgtgctatttcttatcaagtagatcaaacctaatttgtccaagttgtaatttttcaggttgtttagccccgtggaaaatcagtttaaataatcgattttcaacgccagccttgaaaacaagttgtttatcgccaatattaattgtataggtgtcaccttcacttactacttctgcctgcaagagggctgaccattgtttagcagcctcttctggatcactaacattaaagattgcttgcttaacaaaaaggtcacctgccggatggaatttaattaagccctgtttcttgaggtcttcccggcgttgatcatcgttgttgccccattgaataaagaatggtgcaggtaaatggttaacaagttcatcattgacatagaaaatcttccattgaataagtttaccggcaggatccacgcgctttccatcagtaatatcaccaacattaagccccagaccctctaatcgctggtgagtttcttcaatattgtcagtccgaatggcaattgttgtgatgcgctgaataccagcaacataatcttcaacggcatcatgaattgctgagttattttcatatgggaatgccttagctttttccttattagcgatggttaagagctcaatgtaattaaggccaaaataatctagtgcattttttgttccccaatattcgtgatgtccaccaggggtaaaggctaaacctttagagttgaagtaatcaattgcatcttgaaggttagttacatcaaccattgtatgatcccaatttaacgtttctgtcattttaatcacccttgttctgtttgcctaattcctttgttcgtttaacagcagcaaggacagcattttcaattcccgctgaaaaagtgcttttatctagttcatgctgggcggtgatacccactccgccagcagaattattaatatcaagtaattcggcagggtgtttaccactttgttctacaaatgcagcggctgcgcgtagattctcaagagcaagtttgtttgcttgttggcgaggcattccggcaagcacacctgcgtttgtaaaactaattagaaagttatagatatagtttggtccagccacgccatatccagtaaatacatctagcaaggattcatcaatgtaatcgacttttccaaaactatttagaaagtcttcaatgacagtttgattagctcgattgtttttaacgacgccgctataacccatggcaacatcagtcaaggtattggggatgatccgtgtaattgcaaaaagatcttcctgtgatgaaagttgtgcaactgttacgccggcaataattgaaagcacgtccttttggtagtggtgggcgacaagttctttcatgatctcttgccagttatcttgtggacgcactcccagaataacaagatcagcattctcaacagccgtccaatcaggttgttgacttgcttgaatatgataagtatcagtcaaataattaactcgattgctcgaaatatctgttatcccagttgtttcaggagtaattacttttttcttcagtgcagcccgcagcattgcttccaccatttgaccaccaccaaatgagtaaatcttaagtgtcattgaaacatcatcctttctatatgtacctaacctaatcgtagcgtatttcaaaccgagacgctaatttaaacacttctttcaaaaaaataaattcacaaattggtctacttgaaattaaattaacaaggaagcgtttgctgtataataaaattgttagttataaatataataaaagggcttttgtttgttaaaaaacaaaattttcaatatgaggtaattggattttgatggagtaatattagttgaattggtctatgaaatagttgtaaaatgtaagcgtttatttaaggaggaaccataatggcatatcaaagtatcaatccatttacgaaccaagtagaaaaaacgtttgaaaatacaactgatgaagaattagaacaaacattgactacggcgcatcaattatatttagattggcggaagtataatgaccttgaagaacggaaacgtcaaattttaaagttaggtcaaatattacgtgaacggcgtgttgaatatgcgacagttatgagtaaggaaatgggaaaactaattagcgaagcagaaggcgaagttgatctttgtgcttctttctgtgattattatgcagcccatgcagatgaatttatgcaaccaaaaatcattgcgacaacgagtggccgcgccaaagttttgaagcaatcattaggaattttagttgcggttgaaccttggaatttcccattttatcaaattgcccgggtatttattcccaactttattgcaggaaaccccatgattttgaaggatgcatcgaattgtccagcatcagcccaagcatttgctgatgccgttaaggaagctggtgcgccagctggcagtttaactaatttattcctttcatatgaccaagtaaataaggcgattgctgataagcgggtagccggtgtttgccttactggttctgaacgtggtggtgcaaccgttgctaaagaggctggtgctaatttgaagaagagcactttggaacttggtggtaatgatgcctttattatcttagacgatgcagattgggaccttgtcgaaaaagttgccccggcagcccgcctgtataatgccggacaagtatgtacatcatcaaaacgttttattgtacttgaaaaggattatgatcgtttcttaaagatgatgaaagatgcgttctcgaaagttaaaatgggtgatccgcttgatccattgacaactcttgctccactatcttctaagaaggctaaggagaagcttcaaaaacaagtagatacagctgtagaaaatggagccaaagtttactatggtaataagctggtagatatggaaggacaattctttatgccaacgatcttaactgatattactccagataacccaatatttgatacggaaatgtttgggccagtagcttcagtttataaggttagttccgaagaggaagcaatcgaattggctaataattcaagctatgggttaggaaacactatctttagcaatgattccgaacatgcagagcgagtagcagcaaagatcgaaactggaatgagttggattaatgcaggctgggcttcattaccagaattaccatttggtggtgttaagaattcaggttatggtcgtgaactcagtagttacggaattgatgaatttactaacaaacatctaatttacgaagcacgacaataaaaattaattaaacgacgcaaataaagggatcgcaagtttggattgcggtccctttagtattacctgggaaattattgaattcttttcaatacaatcttgcaatattgtcttacttcttatatacttagttacataagtgattaactacaaaattgctatttggaggaatattcatatgactgcgaaaagaaacagccatcataaatctcgattacgacaattatttgcaacacgtcgacgtcggtggattggcatcggtggcctaattgtaattataatttttgtattagtttcaattcgacatgcaagtgaggaaaaagcaacagaaaaaaatgaatataatattctacgggttactgagcagtcagattttaatctgacaggaaagattgaaccagtccagatgcaaacattaaccttgccatctggtaacctgcaaaatcttaatgtgaaaaacggagatcacgttgcgcaaggagaagcgctcttaaccatgcataatgatagtacacaagatagtgttactgaactgcagggagatcttagtaaaagtcaacgaacgatgaatgtccaacaacagacgattaataatttacgccaacagttgaatgggatggggcaaggtgatgaagggtacaatgacctgcgcaatcagcttaccgaagcgcaaaatgcatatgcagacgcacaagcaagtgttgctgccactcaacaacagcttagcaccgcttcaagcaaggttaatcaaacattaacagcaccttttgctggttatgttacggttgaccaatcaaagcaaaatgctcctgtaattactctttactcagatacgcttcaatttgtcggtcaagtttcggaatatgattatagtaaacttcatcaaagtgctgatctaaaggtgaaggccttagcaacaaaccgaactgctaatactcaggtaagttatctttcaacaattccaactaaaaatagtggaaataataccaaatatgaagtaactgctaatgttagtgctaataaatttatggcggggcaaacagcaaaagcttctattaaacaagatggagttcaaattcccaaatcggcagttcgtcatgggaaggtatttgttgttgattcagacaatcgagttcgcgagacagatgttagtggccgggcagtcaacagctcttatgttgtgacagacggtgttgatgctggtgatcggattgtgactaaccctaacagtaagttgaaaaataatgcaaaggttgattaatatgatcaagctaaagaacattaataaatattaccgtcaaggtagccaacgttttcatgttctccatgatattaatgttgacattgagcaaggagaattagtagcaattatcggtgaatctgggtcaggaaaatcaaccttgattaatattgtaggctttcttgatgatgattttgagggaacatacttctaccaaaatcacccaatccatgattattcgcgaaagcaattttcaaatttacgaaatcaaaatgtcggtttcgtttttcaaaatttcaaactgctacgtggatcaaccgttgcagataatgttggattacccttgctatatgcaggaaaacgacgtcgtgaaattggcgaacgtgtttctgaagtcttagagcaagttggtttagccggatatgaaagtcaatttcctaaaaatatgtctggtggacaacaacaaagagtatctattgcccgggcaatatcaacgaacccgaaatttttaattgctgacgaaccaacgggagcactcgatacagaaacaagtcaagaaattatgaatctttttaagcgattgaatcatgaagaaggaacaacgattattatggttacccatgatccccatgtcgctgaacaatgtgaccgagtaattaaaattattgatggtcgaattgtaagtgacagtaaaggcggtgaatatcatgcagacaattgagttgatcaaatcagctatccagtcattaaaggcgaataaaaagcggagtttcctaacgattatcggaattatgattggtattgctgcagttattgctatccttggaattggggacgggattacgaaaacgatgtatgataagttcggtaataatgctaagcaaggccagcaaacaaccgaaatcgtctataatcctgataatgttaattcgactgtcaatggattcacgcaggaacaagttgctgatattaatactcaatttggtggtgaaattaaaaaggctgagattgagcaggaatcagataatctttcaacacatgcagatattggtgatgcgactaaatcagtgacattaagcttattaaaggaaccaacccatacggtaaaactgattgcgggtcacaactttggtaaacgaacttttgaactaggggaagctaatgtcctaatgagtgaaaaagtagctaaacggcagtatggttcagcacaaaatgcgcttggcacaactgtaacaattaataatgtcacttataaagttacgggagtatataagacacaggcacaattcactgatgatgggaaccaaaactcatacggagttgatttattattaccgaagaaagtttactatcaaggagatagtgctaaagaaggaaatacgcttaaattaacctttagccagggtgtaaatgccagtgctatttcccgcagagtcgcaaagtacttaaaaaataatagttcagcagcgactcaaggaacctatcagtacctagacatggaaaaagcccttaagcaattctcttctcaaatgagtattattactactttcattagttttattgcggcgatttctcttttcattgccggaattggggtaatgaacatgatgtatatttcagtttctgagcggacgcaagaaatcggaattcacttagctgtgggggccacaccatttaacatcatgatgcaattcttagtggaagcagtaattcttaccatgacaggtggattattaggctttttaggcggcgcaggattggcgcacttactagcaccgcttttatcaagtgcgattggtggtggcggcattcatattcacgcccatatttcacttaatgctttcttgttggcatttggaacatcggcagctgttggtttgatttttgggatcttgccggcacgccaagcagctaataagaatttgatcgatatcttgagataagaaaatcctcagttttttgctgaggattttttacgaattctgcagaatgtaaaaaatatcaaattattgagtataataaaaagataaattaaagtgaaatattaggagataggaaaagatgagtaaaaacaggggtaaattaacggttgtttcattactagttgtaattattgtggtatgtgggggatatatgctattacatccatcctcatcaaagaaagttgctagtgaaaaagctactaagaccgagacaatcacaagcagcagttcatctaaagaacataaagcagctacagaagatagttcagataaagttaaggatgatgattctgatgattcgtcttcagtagctgatactaatgatagtgaggcaacttctgcatctgccacagtaagcagtggtaatcaaacagcccaacctgcacaaagtcaaaatacaacccaagcaacggcggtaagtaattctggtcaaactgctagtcctaaagctaccacgaataactataagggaaactgcagtgtcgccaacacaaataaccggtggacaggaagccgaaagacaacccaagctgcatcaactcaacaacctgtaacagtggaagatgggatgaactttagctaccgggctgcgcaaaaagctggcgtgattgataataatacatctgttgaagagttttacaaaaatgccaaggaaggtaatggctctgtaacctacaacggtcaaactatttactacaaagctaagggtaataatcaatatcaagttacaaccgctaaatagtttgattactaaaaaagtgtccggcattttgtccagacacttttttagtaaaaatactatgaaaaatgtaaaatatactaattgtttgcgctttagtatataatgaatatgtttattaagtgatcattcagtatagaaatatacttaaaggtttggatgttattggagtacttttatgcaaaaactatctattaaacaactaataataattacattgtgcttattagtgctggtggttggctgcatgactattcaccagcgtcgtcattttaataagaacgttaagatcgataatgtggcagttggtggattgactgctaagcaagcattaaagaagttacaagataatccacaatcgccaaaaatttatgttaacaatgaattagtatttaaggataagcaatcagtagcaaagtttagtagtgctgacaaacaaaaaattaaaaatgcattacatagtcagtatactttcttcccatcatctaaggcaaagaacattgcgattaagcctcaaaatgttaatcaagatgaagtatcaaagattgatcaagcagtcagtcaaaaggtaacagaactaaataatggtcgaaaagctcctgttgatgcttacgcggtatacgaaaatggccgagtacaagtaaaaccagcagttggtggtactcaatacagtttagatggtttgcataataaagttgaaaatgaaattgctgggggaacagttcatctgaagccaaaatatacgactccactttctgcaaatagtaaaactgttcagaatgaaaaagcaaagctcgaagaattatcaaaacgaactgtaacataccaagtccaaaacaaaaaatatcaattaaattgtggtgagattattaccagagcaacctatcaaaacggaaaataccactttgacactggagcagctgattcaaagattaatgaaattaataatacccaagcaactcttggcaaatcatttgaattcaaaacccatgatggatcagtgatcaaaacaacagatgctggctcatatgggtggaaaatcagtaagaaacaagctggaaagactcttacgaatgcattggttgcaaataagcaaacagtaaacgccaaaaatgatatctatggtaaaggatataatcaacaaggaactgggtataatactacaagcaacaatggtataggggacacatacgccgaagtttcactagccgaccaacatgcctggttttataaagatggtaagtgtgttcttagtactgatattgttagtgggacgaataataaggataatgaaactcctaagggtgtctggtatatcatgtaccagcaaacaccgtctgtccttcgaggccttaacgatgatggttcgaaatatgcaagtaaggtccaatattggtcaccatttactgatagtggatgtggatttcatgatgcaagctggcgtcatgactggtcaaaacaggcttatcttgctaaaggtggtggatcgcatggatgtatcaacatgcatccagatgttgctggtcaagcctttcatgacttacagaaaaatgagcctgtaattatctactaaaggagaatttattatgcgcccaagtgctgaacgctcaataatgattgcggttatttgtttcatattaacaattattatttcattcgccatgtctgagggatggataaagtagggatttaacgatggatttagaaaagaagaaaaatttggtaattattaatctattttatgtaggattaattttgatttactgtattttacatgcaggaccactgaatttaatggtgtttttgggtatgttagtggttgcaaatttaatggggatgttaattaaataatggtttagaaaatgattgatttaactttaccacaagcattcgtttcgggctttttaaatgtttttgaactaattattatttggtggattatagaatgaagttagccacccagttggtggtaaataaaaaacgccattcggcgtgacatcaggtatcatattaagtgaaccaaacctatatgaaaggatgtccgtcaaatgacgcacttaaatgataccatgtctactagtttattgactactcataaaaagaatgctcatcttactaaagaagaacgtgtgatgattgcgactttaaagtcgcaaggactttccaatcgcgcaattggtcgccaattaggagttaatcatcaaacaattaataacgagctcaaccgtggtacggtccgccaacttcgtcgtcaaaaatctaatggtaagatttacgaatattcttactacatctatagttatgaagctggtcaggccacatatcttgaacatcaccgccattctggtcgtcgtcgcttatattattcttcaaagcaatttttacgattagctgatcagctaatgcttggtgagtttgacgaccaccattactccccacaagcggttatttataaggctcgagatttaatgaatgatggcaccctgatcccaaagtcggttgtaactttatatcaatggattaatgagggtgtgcttcgtacgtccaatttagacctctttgaaaagcctaaacgtaagcatcatcgaactcatccgcaagctaaaaggtgcttaggtcctaatattgctcaacgacctcaaactgcggaccaacggtccgaaattggccattgggaactagatacagttcagggacagaaaaacggtaatgacagtgttgtactagtaatgactgatcgcctttcacgagttaatatcacgagtaaaattgctggtaaaactgcgcatgcagtaaatcagttctttataaatttacgccagaaaatgggcacagatgcttactatcgcatctttaagacaataacctctgacaacggttcagaatttagtgagttaacacaagttcacgatcatgttttctatgctgatccgtattccccttgggaacgtggatccaatgagatcaataaccggtttctccgcaaggagattaccaaaggtgaagctataaataactatagtagtgctcagatcatagcgactaatgattggatgaatcactatccacgagctatgtttaatggacattcgtcaatggatatctatcgtaaggccttctaccaagagatatcacagctccatcaaccaataatcaattggtcagtattatttatttgagtccagtggctaacttattcttgaaatttaggctaattattatttatagactagtgacgggttatttgaacaggaaaattattttagttgatttccttgcaagcttagttattatttgcgttcctgttctagaaggttcattagagtttccattaataatgatatatttatggctgtttgataggaaacatgatcgtcagcaaattatatataataaacccgtggtgctagttaattttttcctagaggaaaatgtctaaacatgttggtaaattaacaaaaaaatcttatttttatggtcttaaaattcatgtgatcgttactaagactggctttccgattacttactcaatcacgaatccaggtgtccatgacgtgaaagtgttagagactttatcggaagaagcgaatcttcccaatatcctaggggacaaaggatatattagccataaaatccatgaaaagcttgcccttaagggcattactatatccgttccgccacgtaaaaacatggataaatcagaaaaactagaccatagcttacttggaaaacaaagaaaaattaggttgtcaaaatttcaactcacattctgttaaagggctagagagtagatttgaaagcatattgctggcttacagtgttctattaagtcgagcacaacgacgttttgaaggaactttgagatattctttaggatattaaaattaactagcaccacgggtgatttatagtatactatgtcaaaaggaggagttaggtgaacaatcaaatcacactagcatatttagatcatgatgatctagatgctttacaagttgtaagtgttgtcagtttttatgaatcgtttatcgatggcgcagatccacttgatatgcaagaatatttacagacacaattgacaactgaaatattggcagtagaattggcacagtcaaccagtaaatttattggtattaaggatcatcaaatactcattggttatatgaaagtcaatgatgaaaaagatgctatagagattcaacggctctatctgctcaaagattatcaaaacaaagggttagggcaacggttactcgatgaagcgaatcgttatgctaaaacgaaacaaaaacgttatttacgtttggctgtttatgaaaaaaatcatgcagctattcgtttttatgaacgttatggatttaaaaaaatcgggatcaaacattttcttttaggaaaacaagatcgtatttgtccgattttagaaaaagaaatctaaaaaaacgtcctcacttttgatgctgaggacgttttttagactggtagtggaaccataattcgctttcttttttgataaaacgctaattccgtcacaccttttgctttggtggctaacttcattctataatccaccattttagatattccggatgcaagcgatgtttatgaaaaaaagtatctgtattttttttacagttattgggatctttgctactatcaagattttatttaaaaagtaaatggctgggaagaattttttctcctcagccattttttcaactaatcaacttttacaaatccatcttgaacaaatttcgttccgtaggtcagagtgttttccacgggacactttgcggcaacgtcagcgaggaacttcttgatgtcttcatcagactcgctgctgcgaagatgtggttggtaacggatctcagtaaacttacgaacattcttaccatcagcaacgtcttcacggccaaggtcaccttcgattgttacccaaaaagctcgtaagtcaaagttacgttttttagctaatgcctgagcagtaattgcttggcaggcaccaaatgacgcaaggagaatttctactggattcatccccgtatttgtactttcaggttcatcaaaggtaatttcaaaaccacgggtacctgctgaaacttgcatccccgttgttgtcttagttgctgttactttatatttactcataaccgtgccctcctttaatacccatagtgtaatcgagacgatacttttggtcaatgagggtgctcaattataaggtgatttcatgtgatgatttttcgccattaaggattgccatcacatcatcaagtgaaatatccaccatatttttgaccgctaaattagtaaagaaggcaatgtgaggcgtaagaataacattatccatttcgtgtaattctttaacaaggggctgatcatcaagcccttgttctcgacgatttgtggccgccaccgtttcttcaccttcaaaagtatcaagggcggcagctgcaattgttcccttttttagggcggcaactaaatcagctgtattaacgactggaccacgactagcattgactaaaccggcagttggtttcatcatttcaaagtcgttagcagtcaataaatctttagaagttggatttaaatcgacgtggagactaacaacatcggcttgctttagtaattcttctttagaaacgaactggacaattccatcgaggtcagtgcgcggattcgtgtcataaccaagaacagtggcacctaatgcatgaagaagctttgccagggttccgccaatgcgtccaacaccaataattccaatcgtggcagtatgaatttccgttgattgttcatcactaaaccagcggaagtcattttcggcgacttggtggtcaaagcggtaagttttccgaagcaaccggaaaatctgcattaatgcaaactcggcgacactccgcggtgaatatgctggtacattggtcacgactaggtcattttcattagcctttttaatgtcgaccatgtcaaatccagctgtccgcgttgcaatctgtttgagcccattggtatggagcttttcataaatatcagccggaactttactacgttgctgaatcacgagtccatcaacatcggcagttaattcaacagcatcgtcaatcaatttcggcgttgtgatgatttcgatattatgttcttttgcgtattcgttaatggcgatttgttcatcgtcccgcacactagtcattaagatttttgtcatgttaatcctccttattaatgaaggctgcaatgttatcaagagctctggttagattttccatactggtggcgtaactgattcggacgtaaccttgaccgccagcaccgaagaaggaaccaggaattacagcaacttttccttcattggcaagatctgtcgcaaatttaaggtcatcattaccatattgttcaggaatcttggcaaatacgtagaaggctccttgaggattaatcagctcgaaccctaatttttggaggttattaacaacaaaatctcgtcgttgctcataggcatctttcatttcttgagtagctgtttttccttcgttagtaccaaatgcggctactgcagcggccattgctggattagaagcagcggttactaacatcgcgtgaatggcactgactgatttcatcaattcttgcggcccagcgataaaaccaatgcggtacccagtcattgcatgtgactttgaggcaccatttaaaattagcgtttgttcgggatgtaattagcgattgaagtatgagtagctccgtaaacaagttccgagtaaatttcatctgcaattacaatcaggttagttgatttaaccgtatcggctaatactttaatttgatcttgggtgtaagtaacaccagttgggttggaggggtagttaagaactagtccctttgcgttaggatgttcttctaggacgctttggagtcttgcgggtgtgagaataaaatcatcgctgcttgtatcaacttcaatcggaatcccaccaagaatctttgtgacagccatgtagaaggggaaagttggggttggaatgataatttcgtcgccaggattaataatggtagaaagagaagcgaaaattccctctgttgcaccaactgtaaccgcaatttcgttttctggatcgtattctagctggtaacgatcttgcataaaatgagcgatggcttggcgtagtgctaaggttccacttcctggagcatagtgtgaatcattggcattgatgctatcgattgcggcctgcttcatcgcggctggtacattaaagtctggttcacctaatgttagtttaatgatgccagggattgagcttacctgataatcaaattcgcggattccaccaggagtgagtttagtgaaattattgttaagacgattaaggatttcttttttagtagctggcatgataaattcctcctatatagtatgtagatttagaaataaaagaagccctgaatgctataggaataacatccaaggcttcttgatcagattggaatgagtataaaagaggctctcggatgtttgggggtcatccgggaacatcacaatgacaaaatcactgctggttagcggacggtaattgcgctaaaccagaagacatacgcttgattcaagtgaattgtcgcagtgatcatcattgtgtcctccttttgattaactgattactaataattctaatcattttttaatttttgtcaagcgttgattgagaaaaactattaattacaaaaatatttattggttacaaatgtaaatataacaaagtttgaaaatgtttgtgattattagttcgcctttagtttgatattaaaattatattctacaattttttttatttttttgtgtcttttttgttgtcttactccacaaatgtgatataatattaatcgtaaaggaagtgagtagcaatgcggatcgacatcaaacattatttggaagttaaccacttgaccatttatcaagtttccaagcgttccggttacggctacacgactttacacaaatcgtttaacaaaccacagtctagttcgacctcgcttaacctgcgtgatcttgatgccttggctcgtgctcaggacaagagcatgtggaaggtccttaaagaactagaagagcattacctcgaatgagattgtggctttgctgtagccacaggaagttaaatgcgttaacttttaacttctagaatacttagactacgaaacttagaaaacaaaatagtatatttaattgaggaggaattgcatatggctcaaaacccaatgaatccatttgacaacgacatgaatgacatcttcaatcaattaatgggtggcatgaatggtttcaattctgataatcggcgttacctaatcaatggtcgtgaagtgacaccagaagaatttgctgaatatcgtagaactggtcaattgccaggcggtgcaaatcctcaacaaggtgggcaacctggccctcaacctaacgcaggtaaggacagtatcttacacaagttaggtcgaaacttaactcaagaagctcgtgaacatgaacttgaccctgttattggtcggaacaaggaaatccaagaaacagctgaaattttaagccggcggacaaagaacaaccctgtattagttggggacgctggtgttggtaagactgctgttgttgaaggattagcacaagcaattgtttccggcgatgtaccagctgctatcaaggacaaggaaattatcagtatcgatatttctggtcttgaagcaggtacccaataccgtggtagctttgaagaaaacatgcaaaagttggttgatgaagtcaagaaggctggaaacatcatcctcttctttgatgaaattcaccaaattatcggtgccggttcaactggtgattctagtggttctaagggtatgtctgacattattaagccagcattatcccgtggtgaactaacagttatcggtgcaactactcaagatgaataccggaacactattatgaaggatgctgcattagcacggcggttcaatgctgttactgttaatgctccaagcaaggctgatactgtagctattcttaaaggtatccgtgacttgtacgaacgtcaccacaatgtaaagttaccagatgacgttctccaagctgctgttgattactctgttcaatacatgccacaacgtgcattacctgacaaggctatcgacttaatcgatatgactgctgctcacttagcagcaaagcatcctgcacgtgatgctaaggcaattgaaaaagatatcgaagcagaagaaaagaagcaaaaagctgctgctaagaaagaagattacaaggctgctcaagatgccaaggaaaagattgctgacttgaagaagcaattgagcgaaaactctaaatctgaaaaggttactgctactccagaagatgttgctaaggctgtagaacaaattactggaattccagtttcaaagattggtgctagtgacgttgaacgtctaaaggacatggacaagcggcttgaaggcaaggttattggccaagacaaagctgttgaagcagttgctcgtgctattcgtcgtaaccgtgctggatttgacgaaggcgattcaccaattggtagtttcctctttgttggacctactggtgttggtaagactgaacttgctaagcaattagcccttgatatgtttggcagcaaagacgatattattcggttagatatgtctgaatactctgaccggacagctgtatctaagatgatcggtgctactgctggttatgttggttatgaagacaacggtaataccttgactgaaaaggttcgtcgtcacccttattcaattattcttcttgatgaaattgaaaaggctaacccacaagttatcaccctcttgcttcaagtacttgatgatggtcgcttaactgatggacaaggtaacactattgactttaagaatactgttatcattgctacatcaaacgccggctactccaacgatgctccagttaagatgggtcggaacgaagatgaagaagacttaattaagaagttgactgcttacttccgtcctgaattcttgaaccggttcaacgccattgttgaattccacagtttgactaaggaagacttgaagcaaatcgttgacttaatgcttgctgaagttaaccggacattagctaagaagggaatgcatgttaaggttactgatgctgcaaagcaataccttattgatgaaggttacgatgaagccatgggtgctcgtcctcttcgtcgggttatcgaacgtgaaatccgtgataaggtaactgattactaccttgaccacctcgatgcaaagaaccttgttgctgaaatgaaggatggccaacttgtaattgttgacgctaaggacgcctcaaaagacgatagtaaagaatatacctcaccatctgaaaaaaaggatgaagaaaaaaacgataagaaggaagaagacaagaagtctgacgaagataagaaagacgaaaagtaattttcctttaatgtagaaaaagacataggatgactctgaaatgagttaacctatgtctctttttgctttaaataataaacattattaatgatctaggcaatcactatggaggctaaaaactaattaggatagttgaaaattgatggtaagatctgattttatgcataaaattattgggattaaggagactctcttttaaaacgaattgcctaaaaatatcgaaaaaatagacaaaaataagtgaaaaaatagtctattttggtgattggcttatcaatccatttattcagacgacaaatatattagcaaattatgattagttaaataatcaatagaccacaagtgctattatatcaacgtttgttcgaattaccagctgttaaataagggctgaatagtgattgtttattaccccactttatctgtatcattctttcacagttgtctctaaataagacatttgggcaaaaatgaaacggtaataatttgtggattttagtgtaaagataaattcgtttagtaacttataattatcgcaggaacagatttgaaaaaatttaaattttttacgggctttttcaaatagttttaaacaacaaaaatgaaatgttgatacatactatttgctaattgcttgattagccattaaatattgatataaaggcatttcaaccatagttgcaaaaatattcgtttgattttcgtttgattaatgaatggctatttcgctaataagtaaagcaacttaacgggtgaatagttaaaatgcaaaatgatcttttcggaaattgcctctcttgtaatccctcaaaaccttgatatagtaggaactgttaagtcattaagcaataaaccttgcatgaataatttattttcttttgaatattttttcataaacgggggtttattaaaatgagaaattcgaatacaaataattggcgttcaactgctctgattgcgggggcaatcttgacagcaggtgtcgttaccaccacttcaacgacagatgtacacgctgataatagtcaaaacaatgcacaagtaagtaatgaccaagttacttacgaccaagttcgagcaactgctgatcagcaacttgcacaattgcaatcagctaatgatagtaaaaaagctcaacaagctacggccaacgagcaatcaaatgctgcggatcttgcacaaaccaacgcacaaattgatcaattaaaagctagtcatgctgctctagaacaagaacaagccggtgctattgcacaagcacaagcttctactgctgcttctattgaagcacaaacttcagctgctaatgctgaataccaacagcaaattaacacacaacaacaaaacgaagccactcaacgtgcagcaaatgatcaacagtacgcacaagctgttagtcaagccgctgaaaatcaacaagctgttgctgatatcgatgcacaatatcaaaaggctttaagtgatgccgctaatacgcagacaagccaagcacaggctgctgccaataattacaactcagctgttgctaaggaaaatgatacttaccaaggtaagctatctgctcaacaagcaactaatgcagaaaatattaaaaatgctgaagcatctcttgcatccgcaactgctaatgctaacaagccatatgaagtcgcaactactaatgatgttgccgttactggtcgagttgctaaaccacaaacagatgttaaagttcctgcttatgtaacaaaatatggaattcatctagaagttcgtggttataatggtgctattcctgtatctgattatacttatcctgaatttgctaatacttactatggtgaataccctgatagtactgtaatcacaaacaaggctgctgaatcaactccacatgatatttcagaaatgccattaaacttccaaccaggtctattaagctatgatgctaaaaatgaccattcagaaaaagtttctgctgatggtttaacggctgaccaagttcaagtattacgggcattagctctttcatgggaaaatggtttccgtaacaatgttttccaaaactaccgtgaattttacaatgtggttaataagaatgatggttttgtaaacgttgctccagttaatttagtaagtactgactttactgataacattgcaaatcaagttgttgctaaccggacaaagtacaatattgataataataaccatactgttatcagcagtggaatgcctgccgaagcaacttatactagcgttattaatgatgcaaccaagaacttgaaaaagaatttaacaagtgaattcaatggtaagacagtttacactgacgttaacgaaaacttaactactacgcaagctggaacgccaacccttcttaattacgctattaatctctacaactcaatgcagggtatgtactatggtgaattagtaaacccaacacacatcggtggacatgcagttaaccttctttgtgctggtgttcgaactgtgggaattggtttccaaaagttgactgatgaaatgactgctaagaatggatcaggtgtttctgatcgcaagaacccatcatatgctgtaacgtttgatcatgtcggatttaacattgatcatgatgctaacttaactaaagaagttcaaaaccgtaatgtatggggtacttcaactgttgatgcgcaattaaatactattaagactgctcaatatcacgttaataaggtgccaggcacaaagacagttacgccaactgctactgatgtgcaaaaagctactgctagcgaacaacaaaaattagctgatgttaaggcacaagcacaacaatcccttgatgcgttagctagtgcccaccaggctagcttaaataagcttgcacaacaatataatgatgcgaaggctcaagtaaaggctaactatgatgttgcagttactaaggcagctagtgttcgtgacgctgcccttaaggctactggagttgttgatcttcaagcttacaaagctcaattagacagtgcctaccaaaacttagtaaaggcagaccaagtagctgctcaaaaacttgctgctgatcgtgacgctaagatcgccaacatcaagaaagctgaaaatgtaaagcttgatgctaagattaatgaacttgttccaagcgttgatccacaaatcaagcaattacaagatcaacaccaagcagttattgctcatggtgatgctgttcttgccgaactaaaggctgaaaataaggctgtttataacaaacttgctgaacaattcaatgttcaattagcagctattcaacggcgtgaaaatgctaagagagctaatgaagttcgtttagcaaataatactgttgtccttccttcagcagtgaaagttgctaatgacggtaatactgatactgttgccttcccaacagcttcaaaccctctacaagctgaaactactggacgtgttcaaactgtttcagcaccatcaattgtaaagacagctacacaaacacctgttgcagttacaccagttgttactacagtaaatcatgctgctgaaaacactgttaagagtaatgaaagttcagctccagttgtaacacaaaccactgcagttaatggtacacaaacatcggttgcttctactgctgataacaaagccactaaagcagacaacagtgagaagtcagttgtaaaagctgatactgttgctaagaagagtgaatcatcacaaaaggttgatcaatcttctatgtcaattgttgctttaactaccactgcattacttggtacacttggtatcacttacagttcaaagaagcgccacaactaatccgaaacgattaataaatacaacaaagaggctgagaatatcccaacctctttgttattttaaactgttattctcttttgtatcctatagcttatcaatcaatggttgcataaaattattattgattcgggtaagcttatgatggtttcctaagtttagttcataggctaatcgctcgggatcattttggtcattaactttaatgattcctcgtttcttaaagttaaaattttcggcaatgtgctgcatcgctttattgctgcggtgagtatcaacccgaaaattcttaattccttgcatttggccaactgttagtaagttagaaaatagcaatttactaagtccttggccccgataattactgctgatagctacccggtggatggtagcataaggctcatctggttgttgccactgtccctgtgtaatgttgcggtaggttggttcgggtgtaagttgaagagtcgcagtagccactactttattatcattaattaatatccagtttgtttgcatcacaatatcttgagtaaaggtttcctgatctggataaccgttttgccattgcggactaccatttttctttagaagctcttttgcatcatcaattattttcataatcgccgttaaatcttgaagctgggcgcgtcgtaaatatatttctgccattattatcctcccctgattaataatatttctattgtacgacatttagccttattcagcggagaaaataagcgagattatatttcagaaagaagtggtttgcgttagaatgaaaagcaatgaaatgaatggaggataagcgatggcattaacatggacaattatttggtggtgtttgctactggttattctcttcaatgaaattgcggccatttatactgttttccgcgaaaagcgggatattgctgcaacttgggcatggttattggtgctaacgctgattcctggttttggctttatattatatgcattctttggacgaaaattaccacataaacaattagcccgaataaaatcccaaacgcaactaaaattaaaacaagcactagaaaggcagaagcaacaattcatcaatatgccgaagcctaaagatcaaaccgtccagatttatcggcggaccatcatgctttttcaaagtattgatgactcatttttaacgcggcacaatgccgttaatatttttacaaatggtaatgcgctttttaagaaaatgtttgatgatattgcagcagcaaaaaagagtgtccatattgagttttatacaatttataatgatcaaattggtaatgaattacggacgttacttgaacaaaaggccgctgagggagtagaagtgcgagttctctacgattcatggggatcgatgggagtctggccaagtttttatgatcatttacgtgaagtcggtggttatgcggccccgttcctgatgtcgcgaagtaacttctttgattttcggataaactaccgtgaccaccggaaaatcgttgttattgatggtgagattgggtatgttggtggttttaatgttggcgatcaatacctaggacgcgtttctaaatttggtccatggcgtgatacccaccttcgaattgtcggtggtggcgtttatggtcttcagcgacggtttatcggcgactggaatgcatcaatgaaaaaggatgaagataagattgtgcattaccatccttactttcaaccaattagagttcatggggacgttgcattgcagactgtctctagtggtcctgaagcgccattggaaaaaattaaaatggggtatttacgtctaattaatgcagcgcaggaccatatttggatccaaactccctatctgatccccgacgatagtatattggatgcgttaaaagtggcagctcattcaggaatcgatgtacggataatgattccttcaatgccagatcatgcttttgtatatcgggcaacgcagtattatgctcgtgagctcgctaatcatggtgtaacaatttattactatcaaaaaggtttccttcatgccaaaacaatgatgattgatggtcggatggcttctgttggatctgctaaccttgactttcggagttttaaattaaacttcgaaattaatgcctttatttacaatcaaaatacggtagacgatcttgagcgaatttttgttaatgatattcgtaactgtcgggtgattacaccagcaatgtttgcagagcaaccacgctggttgaagtttaagcaaacagtgtcacgtctgctgtccccaattttataatgatagaacagagctgtgacattagttaggtcacttccacaaaatacgaacagcgcagtacaacaatggccttcagcgtccggcaaagtcgaacgctgaaggcctattgttgcttgcgggagctcgaaaacgaagtcacgagtgacttctgtctcgctcccgtttttagctaaagaatatatgttcgttttatgataaaattagaggagtaatttaggcgatagaaaggattaaagattatgggaaccctgggatttgttttaggaacagcagcgatggatcatcagcaagtgttgattgatcaattagttgaccagataaagaatgcatctgctgatgagagcttttattatttggtgcctaaccatattaagtttgaaactgaaattaatgtccttgctggtcttcgtgatcgtcaaggatttagcggaagtgacagattcgcctcttcacgcatacaggtactttcgtttagccggcttgcttggtaccttttacgagatactccagcttttcaaaaacaacacctttctaaaatcgggatggcgatgctcacttcccaagttgttcaagaacaggcaagtgagctccgtttatatgcaagcgaagtaaaacaacctggctttattcaaaagatgacagctcagcttgaagaattaaaaaatgctaacataaccgccgatgacttaactgatattatttcccgggtgaagtccgcgaatgacccagcagctaatcaggcgtggcttgctaaaatgcatgatgttgagattatatatcatgcttatgaagatcggctacgggaccggtacattggtaataatgagttatatcggcaattagtgtcttaccttcaaaaatcaccagaagctgctaagatgcacttctttattgaccgttttgctcagtttactgcaaatgagcaacaggtagtggatgcattaattacgaatgccgcatcgacaactatttctttaactcttgatcgtggatatccagatcagaaccatccaaatccccaggaacttcctcctaaaaataacttgttttattcctccgcgatgcaatttcaccgtttgtggaaatttggtcaaatgcatcaaaaagaagtaaaggttttgcaaaatgtagcgtttgcgacgactcctcgtgttggtgcggaattacaacaagttgattcgtattttaagcgttatgcaagcgaaccaattggccacagcgagcgggaagacctttcttgtcccccaaatattcaatttatgacaactaccaatcggatgactgaattgaataatgtggccaccaagattcgccaattagttgctagtggtaaatatcgttatcgtgattttcttattcttagtcgccaccttgacggctatcagacaatgattgaaccagtttttgcggcacataatattccagtttttaatgaccatgaacgcttgatggataaccatccactagtaacacttcttacgacattattagaattaccgcagcggggctatcgaacagcagatatcatccaattgctgaagacatggttacttgttccacggacaggcactggcgatctgatggggctaagtgatttccaagcagctgttttcgccactgagaattggtgccttaagcaggcaattgaaggaaaaagtgcttggacaactaatgatccagaaaagattaagcaattatggcaggcacccggaacgaacctaacagaaccaaaatatgcgcaatcacggttgaaaaaattaaatgaccagttagcccttgtaaaagattttgttgcgaatcacttattgccagttttcgaccagtttaaacaagcacaatcaggccaagaacttgccactgcgttataccagttcttggccgctatgggagttacagaccggttatacgcttggcaacaataccaaagtacccgagatttagaccttgcgcgtcaaccacaacaagtctggactaccttttgccaaattctccaagaatatgtggaaatcttgggccaacaagaactacgggatggaactagtgaggtccttgcagattttagtgaattgctccaggcagggtttgcggctgcccagtattcccagattccggcaacgttagatcaagtggtagtctctgaaacgggaattgtccaaagtgaaaatcgaaaagtagtttttatgattggatcgactgatgatgtgatgccagaaatgcaagaaagcgatagtttgctaactgaccaagataaggatgttttgagtgcttatcttgatgaagatttccaataccttcctggaacggcaattgaccaactgattgatgagccatttgttcactatactggttttatgaacgctaaggaacagttgattttctcggcaccgcaaactgatagtgatgataaggaactcagtatatcgccatatatgcatgatatgtctcgctactttggtcaacctgttcgtgaatatccattagctactagcaaggccggacaagagaatgctattgattttgtaagtgccccactcgcaacaataaaccggttagtcgaagttagccggcaaattcgtgatgagcaaggagttggcattgatcgtcaaccggttatgcccgttggatggcaaacagttgctgaatcgttggttaagttagctaagcaatggcaacaatcagcagatactaaggttcaagcagaaggaatatcactaggtcagcgtctatctttagttgctgcgggctttcattatcaaaacaagattgattccctgggaaataaattggctcaggcactttatctccgaacggcacccgatgatgagcgtggacgggtattatatgcctcaatctcgcagttacaagatttttatattaatcagtacgaatattttcttaagtatggtttacggttgcaaaaacgagatgagttaaccttatctaatgaccgtatcggcaccttcttccataaagcgatggagacttttgttacaacaattcgagaaaataatttgtcatttgcagatcttgcccacgaagataatcagatgcaacgtgaccagctgattgaccatgcattagttacagctcaaaagaatcagccaactttattgcgtctcattaattcttcagcccaagcccaattccaatatcaacaattaaccgcaattgttaaaacaatgttaattacattatgccgccaagctgaatataccggctcacaaccagttaaaaccgaagttcagtttggaagaattggtaaccagcagccgggcaaccttggctctcttgattatcaacttaaagataatcatcatatttatctgcggggacgaattgaccgaatcgataatcttaagcaaggaaacgacaatttcttgacggttgttgactataagtcgagtaatcatctttttgacctcacttcggcttattatgggctctctctccaacttttaacctaccttaatgggttacaggcaaacttagctgaattggaaacgaataattcacgactggcaggggcattatatcttcgtttgaataatccgacaattaaggctgccgagttaaagaagagttccctcgatgatttgaaattaaaagagcaccaatacaagggaatcctcttgaatgatccacaattattgcgggagttagataagagtttagataaacaggcattcttatacccccttaaggaatataagaatggaaaaattaaagctaataaagaagcgcttctcgttacgccgcagcaacttgattggttgcaaaacatgaataaggaacttgtgattaatgcgggtaatcaaattttgagtggtgacttgaaactgaatccttaccggttattaactggaagcaaccgtcgtacaggacttgattacagtgactttttagacgtatttcagtttgataatatgcttgaccagcaaaactaccgcgacctaaatcctaatttagcaaaagaagcatttgataatgtagttcaagacgatgatgaggaggataagaagtaatggctggatttaaaccaacgcctgctcaatccaaggcgataaatgaccgtggcgaaaatatcctagtttcagcttccgcgggatcaggaaaaacggctgtgctagtaaatcggacaattgaattgattaaagaagggcaaagcattgatcgaatgctgctcgtaacatttacggacgccgcagcaaagaatatgcgggataaaatcagggcagccttgcagaaaatagtacaagattcagctaatcccaaagatttacgtgaccggatgagtaatcaaattaaccggcttgcggctgcagatattagtacaattcatgctttttgtttaaagttaataaagcggtactattacttgattaaccttgatccacaatttcggctcttaactgacgaaacagagcggttattacttcaagaagatgtctggcatgaagttagtgaagaactgtataaaaacgctgaagaaaaagttccgggcagagcttcctttagcgaactagtcctcaacttttctagtgaccgtgatgaccaaggactcgacgacttgattttacggttatgtgaaattgctaatgcccaacctgatcccgaaaagtggctccaaaaattaccagataattatgatttagggtctggctcactattagaatctaatttttatcaacaacagctaaagcccctggttatcgaaaagctcaatcagctcattcaagattatcgtgaattagtaacaagagctagtgacaacggtctagatcaagcagccgaagttattaaaagtgatgaagaattgatgcatcaacttctttcttcactcggggggattaccgtcagtgatgtttgtcaaatgatggcgcagcaaaaatttggtagttttcggggacgaccagcggcagatgatccacggattgatgtatttaaagacattcaaaagcagcgtaatcagctaaagaagcagtgggaacaaacagttagtatttacttgggaaagcaggaagcacaggaaccaattgcaaaagaagaattgctaactgagctaacgactttccgtgatcaatttacagccttgttaagcaaagcaactgaaagtcaattagacgctaaaactgttgattcattgcaaaaagaccagcagatgatgcaggagcttttagacttattgcaaccacctacctggaatactattcgggacttatttgctaatgctaaatttgcacgaatgggcggcaaaccgaaagacgatgagctagctgaagaagtatataaatcactgggaagtactcgaacggggataaaaaagcaatttgatcagttggttgatcgcttctttaattatcgtgaagaccaatttcgattaatttcaacgaatgcccaggaacttttacgcgaattgagtgcggtaacgattaatttccgtcgacggtatcaacaaaccaagttaaatcggcatgtccttgagtttagtgacttggaacactacgcgtacgctattttaacgccatcagacgaccagccaaactggcaaaccctcgtcaaagatctgcaaaatcattatcaagaaattatgattgatgaataccaggatacgaaccgccttcaggaaagtattttgatgaaattgacatctcctgaacgcaagaatctatttatggtaggggatgttaagcaatcgatttaccgattccgtgaagctgatccaacattatttcttgggaaatatcaaaactatcgtcaaggtaacgacggggaagcgattgttttaggggaaaatttccggtcgatgactaatgtgacgagctttaccaatatccttttcgaacaactgatggatagggaagttggtgaaattgattatgacgaagatgcccatttaaaatatgcggcaacttattacgaagaaaatcaagataataaggttcacccaacagaagtgttactgtatgacgccaatgctcttgatccagaaaaagaagatgttgaacatgaggatgataaattagctggagaatttcggatgatcgggatgcgaattaagcagatggtcgaaaatcaagagttaatttttcatccagaagatggacagatgcatccaattcagtacggtgatattgttttgcttgagcggacaaaggcaattaataattcattgatggaagagtttaataaacttaatattccattgacagttcacgatgttgaaagttattttcaagctactgaagtgcgagtaatgatgtccttgttgaagataattgataatccacaacaggatattccattagctgctgttttgcgatcgccgattgtcgggttaactaaccaagaattagcttttatccgtcttcagaatcgatctgttgattactacgctgccttgcaatcatttatgggtaattaccagcgaaaggctcttcaccatcaatcgctccttacttctgaacaggtaagtgccctctatgaaaaagcagaccacttcttaggcttgcttcgtgtttttcgacaaacagcccaacagcaaacccttgttgacttgatttggcagatctatgaccaaacaggttatcttgattacgttggagcaatgccaggaggccaccaacgacaggcaaacctccatgccctttatcaacgtgcacactcttatgaacaaagcagttttaagggtctttatcaatttattcgctttattgagaaaatgcaggaacatgataaagatttaggcgtagcaccgacacagttaactgcaaatacggttaatgttatgacgattcacggaagtaagggtctgcaattccctgtggtatttctaattgatgccacacatggctttaacaaaggagcagctcgtgaaaatgcagttgtcgatgctgttgcgggggtaggaattcgttacatggatgatcaacgggtcatttatgacacgccgcaacgacaagcagtgattgaagaaatccagcgcggcgaacgagcagaagatcttcgggttctctatgttgcattgacccgcgcagaacagcggttaattattacgggatcctttaatgaagaaatgcggacacagagtcttgttggttcatggcaacggtggcagaaagcatatcagagtaagaatttactaattggcccgcaaccacggatcactgcaaattcatttatggactgggttggccttgcactagctcgttatccagaattcaacgcgcaacaattgagtcgtggaaatgtcacgctagaaaaaagtactcttgctgatactaaagttactggtttggcggctgatcctcactttattgcaaaaacatataccgcacttgatgttagcgatggattggcaaaaattgggcaaaatgctagtgctaatgtaacggaaaagaacaatacagtcgcaactgatgcttctgaacaaaggattgatcaaattttgcgttatcgttacccccatcttgtcgctactaaaacaactgcttaccaatctgttacagatgtaaaacgagtctttgaagatcctgacacacgtgatatggcgcggtgggattatgatcaacaacaaagggtaaagacgcaagggatttacttaaataataactttgacgttccagctttcattcagcagactactcatgaacccgtggcaacagaaattggaacagcaactcaccttgttttccaaaaacttccgcttgatgaaggtccgattaacgttgaatttgttgatcaagaaattcaaaaattagtaggaaaaaaactgatcaatccagttgtagcagcacggatcaaccggaaaggaatagtggacttttatcagactgaggttggtcaaaagatcttaaagcatcccgcagattatcatcgtgaagtgccgttctcaatgattatgaatggtcatgaattatttaaaggggtaaatgttagtgatgatgaacgcattttaattcacggaatcattgatggttacttaaaaaatgacgagggcattgttctagttgattataaaactgatcaccttaacaaagattatcgcgactttgatttagcacggataaaggatcgctaccgaggacaattagagctctataaagaagctttgaacttaatggaagggattccagttgtccaaatggggctttacctgttagaattaggagagttcgtgttatttacaaaagagggtgattagttggcgacaattaaagatattgcacagaaagcaggggtatcggtttcgactgcttctcgagctttaaaccataatccacgaattagtgaaaaaacacgacaacaaatagcgacgattgctaaagagatgggatatcaaccaaattacaatgcacagaacttaacacggggcgagtcaaacatggtcggaattatttttccagtaaccagtgatactgcgcctgccaatccgtttcatattgacttattacggggaattagcatggcattaaagccgattcactatgaaatggttgtggcaattgcgccaactacgaccgaccttttgcaaagcgtaaaatcgatggtcgaacagtccaaggtgcataactttttagtactttatacggttaaagatgaccccattactaattacctgcgccaaaataaccttaattttgtggtaatcggtcatccagacaaggcccaagatcgctttgtcgacaatgataacgtagcggcagggcaagcggcgactgattatctgatggatcatcaggagactagtcaccccgtctttcttcaatctgcaagtaattgggtatttgaacaggataggcatcaaggttatgagcagagtatgcaaaatcatcaccttcctgctcttagctggcgatattcaccaacgggaccgcagttaaagattttattaaacaacatccgcaaatcgattcaattgtttgtgttgatgacttgttgctggtacgattaatacggcaactacaagaatttaatttaccaactatttgttttaacaatagtcggttgatggggatgttaattaatcaagaagaaaaggttgacttacaaccccgcaaattgggtcaacaagctgttgaattactttttaatccagaagagcaattccgaatcgttgattttaaaataaatagttgatagaaaggaccacggaattacttgtcacggtcctctcttatttttatatggagggaaatcggaatggagaaggtttacattgttgctgctcagcgaacaccaatcggtaagtttaacggtcagttagcttcaaagtctgcagttgaattaggagcgattgcaattaaagcggctgttgaaaaggcaaagctcagcggaaacgatattgaccaagtattaatggggaatgttattcaagcaggaacgggacaaaatccagctcgtcaagcatcaatggccgctggcttaggtgagcaggttccggcaataacgattaatgacgtctgtgcgtcgggaatgtccagtgttaacctggcagcaagtttaattcgcgcaggacaggctaatgtaattgttgctggggggatggaaagtatgtcccaagccccatatgttcttcctaaagcacggaatggttatcggtttgggaacggaaccttacttgatgcaatgcaaagtgatgctttaaatgacgtttatggcggttatccaatgggaattactgctgaaaatatcaatgataagtatcagattactcgtcgccagcaagacgaatttgctttgtcgagccatcaacgtgcagtaaaagctcaaaaagcaggctatttcgattcagaaattgtgcccgttgaagttaagcagaaacgaaccactgtaactgtaaaggttgacgaagcaccacgaccagatacttccctagtggctttagcaaaattaaaaccagcttttaaatctgacggaagtgtgactgcaggaaatgcctcgggaattaatgatgggggagctgctttggttcttgcttctgaaagtgcagtcaatcaattaggattaactccattggctgagtggcaaggatctgcagttgttggtcttgatccagcattgatgggtctgggaccatattatgcaatcaataagctcttaaaaaatcagcagatggcggcggatgacgtggatacttacgaaattaatgaagcgtttgcgacccaagcccttgtctgtcaggacttgcttcatcttgatcctagtgctgtcaatccttggggtggagcaattgcgttaggccatccagttgggtgttcaggcgcgcgaattatcgtcacgatgattaatgaaatgcattgggataatcatgaactcggcattgcttcgctgtgtgtcgggggcggaatgggtgaagcggttctgcttaagaaaatttagtaccaagaataacattcatcgtaaaaggcaagtaattgaggaaaattgaagtttttctctattacttgccttctttattttattaagttaaatacgttttaaataattaactataacaggcctgttttgcgggagctaaacagtaataactttaaattataaaaatccacaaccgttttctaaaaatttgcgcaagcggttgcacaacgattttaaatttgatattattaatattgcaataatgtatgaagcgcttacaataatcataagtgtcttttagaactattttataagttaaggagttgttagcaatgagtcaagaaaagtccacgggggctggattacctactctatcaaagagtactatctggatgatcaactttggattccttggtgttcagacagcttttactctgcagagttctcaaatgagtcggattttccaaactattggtgccgaccctaacaaccttggctggttcttcatcttaccaccattagctggtttgattgttcaaccaatcattggttattattcagaccgtacatgggcaccaaaattaggtggtcggcggttaccatacttactactgggaatgattgtagctgttatcgttatgattttgcttcctaattcaggaagtttcggtttcgggtatggttcgctcgctgccctttggttcggtgcaattactgttgctttacttgacctttcatcaaatgtggcaatgcagccatttaagatgatggttggtgatatggttaacgatgaccaaaagagttatgcctatgggattcaaagtttcttatctaacacaggtgctgtgttagctgccgttttcccattcattttaactgcttggtttggggttcgtaacactgcaaaacgaggcgttgttccagattcagttattatcgccttctacgttggggcagccttgttagttgttactagtttatttacagttttccgggttcatgaatatgacccagcaacttacgcaaagtaccatggtatttctgaagatgataacaaagagggtggaaattggttcacactcttaaagcatgcaccaaaggcattctggacagttacccttgttcaattcttctgctggtttgcattccaatacctctggacatactcagctggggctattgccaaaaacgtttggaatactgttgatgctacctctgctggttatcaggctgctggtaactggtacggtgtacttgcggctattcaatcaatcgctgctgttatttggtcatacgttttagctaaggtgccaaacaagtaccacaagcttggttacggtggtagtttacttcttggtgctcttgggttcatttcagtgttctttgttcatgatcaatggacgttgattgtttcatacacccttgtcggaattgcttgggctgcgatgaacacttacccattaacaattgttacaaacgcattgactggtaagcacatgggtacataccttggattattcaacggttcaatttgtttaccacaaattgttgcttcattattgagttttgctttattcccattatttggacactcacaagttcacatgtttatccttgctggtattgtaatggctcttggtgctctttcagttgccacaatcaaggaaacttatgctgaataggagttatttaataaaataagttaattaagttataataaaggcaggttaaagactacctttatttcagatgaaaggaattgagatttcaatgaaacgtacatttgatattgccccttggcatgttgctactcacaaatgggacccacaagacaagcgtttacaagaatcaatgactagtttagccaatgagaatcttggtatgcgtggcttctttgaagaaggttacagtggtgaccatatggaaggtatttacctcggtggagtttggttccctgacaagactcgtgttggttggtggaagaatggttatcctaagtactttggtaagatgatcaacgctgtcaacttcatgaagttaatcattaaggttaatggtgaacaactcgacttagcaaagcaaacaccaaaagactttaagcttgatcttgacatgaagcgtggtgtcttagaacggtgttttactgttgaaattggtggtactgaaatgtacttcaattttgaacgttttgttagtgttacccaaaaagaattagttggtcaacgtctccacattaagaaccgtggcgacagtgatgctaaggttgaaattactagcatgattgatgctgatgtatacaacgaagacgctaactacgatgaacaattctggaacgttttaggcaagtctgctgatggcgaacatgctgaattaacttctatgactaagaagaatgattttggcactccacaattcatcgttggaatgaagactacttcaaagactaaccttgaccacgtggatgacggcactgacgaaaaacacgcttacaacacatttgctggtactgtagctgctggtaaagaagttaactttgaaaagcgcagtatcgtaatgacttctcgtgattacgactcccaagcagatattgaaaagaacttggatgtattaggcgatcaacttgataatcaaagttttgacgacttactcgatccacatattaaagaatgggcagatcgttgggttaagtctgatgttgaaattgaaggtgacgaaggagctcaacagggtattcgtttcaacctcttccaactcttctctacttattatggtcaagattaccgtcttaacatcagtccaaaaggattcactggtgaaaagtacggtggtgctacttactgggatactgaagcttattgtattccagtttaccttggggttgcaaacccagaagttgcacgtaacttattaatgtaccgttacaagcaattagatggtgcctttgttaacgctaaggaacaaggacttgatggtgcattattcccaatggttaccttcaacggtatcgaatgtcacaacgaatgggaaattacctttgaagaaattcaccgtaacggggacattgcctttgccatttacctttacactaagtacactggcgacaagtcatacgttcttaacgaaggggcagaagttcttactgaaatttctcgtttctgggctgaccgtgttcactactcccaaaacaagaacaagtacatgcttcatgccgtaactggtcctgatgaatacgacaacaacgtaaacaacgactggtacactaaccttctttgtcgctggactcttcaatacacccttgacatcttagaccaagtagatgaaaaggtagctaagaagcttaatgtttcagaagacgaaaagcgtaagtggaagggtattgtagacaacatgtaccttccttacgacaaggaaaaggacatcttcccagaaaacgatggcttcatggacaaggacttgactccagtttctgaaattccaagtgaccaattaccacttaaccaacactggtcatgggataagatcttacgttcaccatacgtaaaacaaggtgacgttatccaaggtctctgggacttcatcgatgactttactaaggaagaaaagaagaacaacttcgacttctacgaacaatttactgttcacgaatcaagtctttctgcttcagtttactcaattatcgctgctgatattggttacgaagacaaggccgttgaattgtatgaacgttcagcacgtcttgaccttgataactacaacaacgatacttctgatggacttcacattacttcaatgactggttcatggcttgatattgttcaaggatttgctggtatgcgtgttcgtgatggtcaattacactatgcaccattcttacctaagaagtgggattcataccaattccgtcaaatgttccgtggccggatcttgaaggttaaggttgacaagcatggtactaagattgatcttgtatcaggtgacccaattaccatcgatcttgacggtaagaagcttgaattaaagtaattcttggaggcatttgagatgaagtttgaagatttgaaaggttttgcatttgaccttgacggtgttattgctgacactgctcgttttcatggtcaagcatggcaccaattagctgacaaggttggaactgaatggactccagaattggctgacgcattaaagggtgttagtcggatggattctttggaattaatcttgaaggctggcggccatgaaaatgactatactcaagaagaaaaagaagctttggcaactgaaaagaatgataactatattaagttagttgaaactctaacacctgctgatattcttccaggaatgaaagacttcttagatgaattgaaagctaacggttaccacattgtattagcttctgcttctaaaaatgcgccaaaggttcttaagtatttgcaattaactgattactttgaaggaatcgttaatccagcaaacttaagccatggtaaaccagatccagaaatttaccaagaagcagctaaattaatggatcttccagctgaccaagtagcaggacttgaagatgcccaagccggaattgaatcaattaaccgtgctggtgaattatcaattggttttggtgctgatttgcaggatgctgatgttaagttcgataagactggtgacgtatccttagctgctattaaagcgcaaatgaattaagatccaatttctctcttttaacaatccgtaaagacgtacttagaataatctaggggcgccttttttatgtgaaattatgaaaagaaaaatcgttataataacaaccatcattctaattagttgcttatgggtagtagttgcaattaactttaatcggccgtcctttcagccagttcaagatgaaacacagtcaagtcaacaaccgcgaccaaaatttaccgaccaacaaattggggttttggcgggattggcaatatctcccgactggttaaaacaaaatattgctgcaaatcaactcgtttatggaattgttaagccctctgataccgttccagcaggagtaaatgattatagctatttagtagccgctgacgaccaagatggaacggcaattttctttaaagttgaaggccagactgtgatcataaaatatacttctcagcgaaatgcaaaattaaaaacaaaggacttaaccttggcgcaactaagaaaagaattctaccaaacgaggtcacaaaaaaagcaagtagataactatgtagcaggattgcggaccgagtaaaatttaaggcatcttaaaaatgctattttcagggtattctttagtgatgagtactgtataatattcaaattaaaggaggaaactgtgatgtcaatttatggcccatatgagcagattttgtcaaatattctttccctcacaactgatcggatcaaagaactaaatcagcaaacagtgcaggataagcaaccaaaactttatgaacatttaattgctcgggtgaagacttccgagagtatggcggaaaaatgccaacgaaaaggctatccggtctctactgaatcggccttacgaaaatgtcgcgatgcagttggaatcagaattgtttgtaactttatcgatgatattgaccgttgcctttgccaattacgtcaagctgactggtgtgaggttattaaggaaaaggattatattacaaatgcaaagccaaatggatatcggagctatcatgtcattattgatgaaaaagttccatatcaagatatcgaaggaaataacccgggacatttttatgttgaaattcagttacgaacgattgcaatggattcatgggcaagtcttgaacatgagatgaaatataaacataatattaaaaatccagagcgaattggtcgcgaacttaaacgttgtgctgaccaattagcatcatgcgacgttcaaatgcaaacaatccggcaattaattaattctagtgaggaaggcgaataagatgcgaatccttgtagcagaagatgaacagcagctatctcatgtattaagttcagcgatgacagcgagtggttatcaagttgatattgctaataatggccaagaagccgttgagcaggcgaaagaaaatgcctatgatgtcataattttagacatcatgatgcctgttaaatctggactggaagcattaaaggaaattagagcaactggtaatcgaacatatattatgatgttaacggctatgggtgaagaagatgataaggtaactggtcttgatgccggtgctgacgattatttaactaagcccttttccttaaaagaactacttgctcgtttgcgctcccgtcaacgccgagatgattcttaccaagtagatgttcttgaatttggtgatttgacccttaacggtaacgatcaatcgcttgaaagccataattcgattagtttaacgaatcgggaaaatcgtttacttcagtattttattttgaatgctaataaagaattatcagcgaatgaacttattaaccacgtttgggatgagaatgaaaccgctgatcaagaagatctctggattaatatctgttatttacggcaaaaattacaggcaattcaatctcaagtaacaattagtggtgaaaaaactggaccgtttatgattgcatgctagggggtcaaggaatgattcaacgttttcgctataaatttattgcaatctcaactgcggcattattatttgtaattttgacaattgttggcagtatttgcaccctcacttactatcaatcgcaccaagaaattgaacgggtattgacgattttggtaaataacgacggccaaattccccgaaaagggatccggactactgacaatagtcaacctcaattttcacgtgagggccttcatcaatatcgttattttgctgtactggttgataataaaaatcaagtaacggaagtgcaagatgatcatattgcaacggttacgccgcaggatgcccgagcaatgacagaccgtcttgtaagaagaaaagtgcatagcgggcagttgctatatcgaggggtaaattatgcttataagattcggaataaaaacggcgagaaagtaattgtctttcttgatgaatcactcctcatggcccggacacgatcactaatgcatacagggttgatcttagggataattgttttagttctgtataccattgttttaaccctttactcgcgtcgtgcaattcggccaattattgaagcagagcagcggcaaaaagaatttataactaatgctagtcatgaattaaaaacgccattgacagttatttcagcgaataatgaaatgcaagagattatcaatggtgagaatgaatggacaacaagcaccaagcaacaggttactcgcctgacaaagttaattaataacctggtgtcacttgcacgcatgcaagaacaaccgacattaacgatgttgccggtaaatgtaagtcaaattgccggggatgtggctagtagtttcaagagtgtgatttcaaccgaacagaaacaattcaatgtacagattgatgaaggcttggtagcaaacgctgatgaaaatacactacgggaactgttgaatattttgcttgataatgcgaataagtattgtgatcctcagggtgaaattgattttacagtgtcctcgtctaatcatagtaaaaatatagttattacgattgcgaatagctataaagatggtaaaagcctggatgctaaaaaattctttaaccgcttttatcgggttgatgaatcgcatactcaaggaaaaaaggcaggctttggtattgggctttcgatggctcaatatatcgttaaacaattcaaagggaaaattacggcgaagtatacaaatggtaagttagcttttatcgtaacgttaaaagaagtaggaaagtaagaatgaaattttggcgacttaagattggaatatatgcagttgtttggagcctaataattggtatgctgacagcggcgtatttaaacttagttaactgggtaattgatttagtttggcatcaatacctagatccggcagttagtagtaaatggtatccgtttttagtatgtattccatggtggattatagaatgaagttagccacccagttggtggtaaataaaaaacgccattcggcgtgacatcaggtatcatattaagtgaaccaaacctatatgaaaggatgtccgtcaaatgacgcacttaaatgataccatgtctactagtttattgactactcataaaaagaatggtatctgtcaagttttcataggtagcctttaaatatacagttttagtgggttagtgccttaaaaagttgtcccattggtctacttgtggccgtgttaatcggaattattccttgtactgctccaattgacggctttgtcggtgcctttcttagaaactctccagttcgaatatgcatttcctgtaataggctggtttgagccactcgaggatgaactgttaattgttctaggattgtatttaaactagcttgcagttcaccattcattcgggcttcaattaaaccaatcatggctttagccccctgcttagtccatgacttgccctgtttcttcatccggtaagtaaaagcccggtgagaactttcgactgaaccaattaaatgaatatccttaaatccacgcatttgtggtgagaggatataccgccaatttcgctgtagatactttcttaaacgcattaggtcgtctgcttgtttttccgttaggttttgtgattcataagtatctaaaattattgttagctctgcttgatcatgatgacgaacggctttaattgctcgcatggctaattcgttgtgccggcctaaagtatgttcaattttctgtaaacaatgatagcggtcgagaaagtattcaccatgtgcaccttgaggaactagacttaatagcttagctggttcgtaacctgggccagcgtcactggccaaaaagatcgtttgaccggcaagcttataatggcggtctaaataatcacttagtcgtgcttcaagccgtccttggtgcccaacactgagaaagtcatgccgattaatgatttgattagctactcgctcataaacccgataatggtgcacaagagtcagctgacctgcttcttttttacctttaatcataaaggcatcaccctcaatagttaaatttttaggcatatggcgaggagtagcttggtgttcttttgcttgagtttgtttagctacctgatttcctaactcatgcacggcgtgcattaccgaatcggcagtaattccgctgtcaaatacaaggttcaaaatgtcggcagtattgcgcattgtagttgtttgggcaatcttagccatcatcattaagtagtgtggcgataaacgacgacgtggtttaatttttaattgttggtctaagtaaaattcacgtttctttgtcccagcctgataataccgtcgttgaaaagtcaccgggccaaagataaaattaagcgtccgtggctgtttattaattacttgatagttcgctggagcttgggactttaagcttcgatctaagctttccaaaaagttttgcatgattacttgtcctaactccaataccccttttaaaataatctgttcagcttcaaataaactgcctgatttcaccaaattctgctcgatttctgttaaaatatccatgaggaaagacctgcctttgcttagtattcgacacactaaaggctactggtcttttctttttttgccaaataagtaaattggtctacaaaaaagatttccacgaccagatgaattattcatccaacctatgaaaatcttacactaacaaagaatgctcatcttactaaagaagaacgtgtgatgattgcgactttaaagtcgcaaggactttccaatcgcgcaattggtcgccaattaggagttaatcatcaaacaattaataacgagctcaaccgtggtacggtccgccaacttcgtcgtcaaaaatctaatggtaagatttacgaatattcttactacatctatagttatgaagccggtcaggccacatatcttgaacatcaccgccattctggtcgtcgtcgcttatattattcttcaaagcaatttttacgattagctgatcagctaatgcttgttgagtttgacgaccaccattactccccacaagcggttatttataaggcccgagatttaatgaatgatggcaccctgatcccaaagtcggttgtaactttatatcaatggattaatgagggtgtgcttcgtacgtccaatttagacctctttgaaaaacctaaacgtaagcatcatcgaactcatccgcaagctaaaaggtgcttagggcctaatattgctcaacgacctcaaactgcggaccaacggtccgaaattggccattgggaactggatacagttcagggacagaaaaatggtaatgacagtgttgtactagtaatgactgatcgcctttcacgagttaatatcacgagtaaaattgctggtaaaactgcgcatgcagtaaatcagttctttacaaatttgcgccagaaaatgggcacagatgcttactatcgcatctttaagacaataacctctgacaacggttcagaatttagtgagttaacacaagttcacgatcatgttttctatgctgatccggattccccttgggaacgtggatccaatgagatcaataaccggtttctccgcaaggagattaccaaaggtgaagctataaataactatagtagtgctcagatcatagcgactaatgattggatgaatcactatccacgagctatatttaatggacattcgtcaatggacatctatcgtaaggccttctaccaagagatatcacagctccaccaaccaataatcaattggtcagtattatttatttgagtccagtggctaacttattcttgaaatttagggtatgtattccattgggatttttgattggtttcttgaatgagcgatggggtaattacccgttaacgattgaacaagtgctgacgcaagtaaggttgaaagggcaattaaattatcataattggtggaagtcttttattcttggcttattggccctcggagcaggagggaacatcgggccggaagcttctacaacagtcttaactagcagcatgattaattggcttggtgaccgtatgcgctgggcaacttcaatgcgccagaaagtttctctttggtacggtaaaatgcaaacgcaagatttagcccgtgctcctagattcagtcagctttttaaaaataaatatcaacgagtctttgttatttcaggattagttggaattggaatagtaggcgcggcgattgtttttaagctttttcctgaagaaggtgtttttgggatgcatcaccggatcattaattgggagtggatcaatttattaacgagtattccaacgattatcattgggattgcttttgggtggctgtttgttcacttagaaaattgggctgcactgataattaatgcaaaaataagtaagatttggcaaggtgggatttttgggttaattttagcgatcagctcgttgattacaagcgatatcttattttctggtgagtttagaattgttccttttacccacgaagccttcaatcattcaatcatcttcctattagttatagcactcgtaaaagccgtaatgagtaatctgggttttgcaatgggatggcggggaggaactattttcccggctatcttttcgagtgtcgcggtaggaactgcctgtgcgatgatgttgcctggagacgtacggataaatgcaattgttgtaatcgcggcaagccttacctttattttagaaaaaccgttattaacaattatcctgctgttattattggtaccgattgaactagcgccggttataattgtagttgcatttttagtaggaaggattattaaactttttcctgctagtgaatagagaatctttaatatcttttgtgtaataaagaagattgagtacttgctaagcgtgaaaaattatttaaatttcgttttattaatattttgttgtttatatgagaaaagtcctgtatctttattaaaaacaattagagaatggggcgataatgtgtttagcagaattggtcaattaatattcgataatgaagctgttgcaaagacttctgattttacaatgggtcttgagattgaaatgcaacgagtagacgaagatggcaacctaagccttgagccatatccgtcagcgattggggatgagaagactaatccatggattaccaatgattttttagaaacaatggctgaaatggtaactccttctgcccaacatgctcttgatgcaatgcattatttgtatgttatcaataatacattgcgatcagctcttgctcccggcgagttattatggccgttatccatgcccccacgacttcctaaagataagactaaattacggttagctaaaatgggaccgaaaaaagaagcttatttgaaggaatgggcaaaacgtcatgggtactcgcaaggaacgccctgtggagcgcatattaatttgagtattgatcagcacattattgagctagtccttaatgctttcccggaacgctttaatagtaagcgtgaagtgcggaattatttatatactatcttggcacaaggttttgtccgatatcgatggcttcttacgtatctttatggtgcaagcccaattgttgaagaaaattattttgaaccgggaaaagagttgcctcatccgattcggagtgtgcggcaaagtcaatacggttttgggaccaaatttaccggtgattttactaatctcgatcgttacattgcacggattgaagaaggagttaaagcagggatcttaacatcggattacgaatttcatggtccggtgaggttcaaaggaaacacggatttaaaaaagttgcctgaacatggaattgagtatttagaattacgaatgctcgatttagatcctagcagttcagtaggagttcgaactggtacactaagatttattcgtttattagcaagttacttgatcatgcagccgccattaaaagaaaacgaagtagaagaaatgttggtgactgccgataaaatgaatgaagttgtagccgaggaaaatccccaagcaacttgtagatatcaggccaaagctcgtgctgtcctcaaaagtttagagcggtatgccaatcaaatccaactcggtccagaatattccgaagttctggaagacttagaagatcgggtcgaaaatccgctaactaccccgagtgctaaactcttaaactatgtaaagaatggttcactcaccgagtatgcgttgcgtcgtgccaaacgttaccaacaagcggcacaggaaacaatccatccttttaaagggtttgaagatggacgaatctatactgctgatgagcttcgaaaagaattaacattgtaaccttttcaaggagaagctagctccagtaagcaataataggcctccaacgttcgattttaccgggcattggaggcctattattctatgtttttttctgaaagtaacttagcttatgtcacagccctccactatttatttagccgcttttttcgctctagtaattaagtcagcaaaaatagcgcgcgaataatcgtaatgtttaaacatgttttctggatgccattgaactgctaaaatttgatcagagttaatggtttccacggcttctggtacctgatcatcagcccatgccgttacatgaagtggttcagcaatctgatttagtgattgatgatgacgtgaattaacatatggtctgggtcctactaagttaaataatcgacttgccttgtctgtattaacgtggtgggaaggaaaatttcctggggcatcttgggaatgcttaagggtttgatggggattttccgaaaggtcttggtataaagtcccgccaagcgcaacatttaatacctgcattccacgacagatccccatcattggttttccagcattaaatgcagctgtagcaagactaatttcaaattgatctcgtttaagatatgtgggacctaatttttgatgcggctcttcgttgaaaaaggttggatcgacatcacttcctccagcaaagataatcccatcaaaaagatcaaggtaggatggtgctagtgaagcagcaacactaggaagaataacgggtaatcctcctgacttgataatggcttcgattaatgggcgaggtgcgaaggcagcatttcgctcgttaatgatgtttgtagcttcagttaatgtatctgcaggaatagcaattcgtggatgcatataacccctcctcatttagttctcatgatattataatcaaagcataattcatttggaatagcaatcaatatttttaataaaaaaagatataatagaagaagaaagaaggaatgtaaagatgcttgaattaactaatattaactcaacgttcaacttaaataatgaggtcaagattccctgtgtgggatatggtacatttaggactccggcagatgtagctgaacaggccgtgaaagaagcaattgaaactggttatcgacacattgatactgcggctgtttacggaaacgaagaagcagtaggcaaggggattaaggattcgggaattaagcgtgaagacctttttgtgactagcaagttatggaatactaatcgtggctatgaacaaacgaagaaggcttttcaagagacgcttgatcgtttgcagatggattatttagacctttacttaattcactggcccgccaatgaaaagcagtttggagatgatgctgccaagattaatgctgaaacgtggcgcgcaatggaagacctttacaatgaaggtaaaattcgggcaattggggtaagcaattttatgcctcaccatattgcggaattaatgaaaacggccaaagtagcgccagcagttgatcaaattgaggttcatccgggttggccacatacggaagaaattaaatacttacaagcacacaatatcttagttgaggcatgggctcctttaggtggtcaaggtgctaaagtattaactaatccaacaatgattcaaatcgctgataagtatcaaaagacgccagcgcaagtctgtttacgttggattctccaacaggggattcttccattaccgaagtctgtccataaagaacggatgataagtaaccaaaatatatttgatttcgaattaactgatgaggatatgcgcaagattaatttattgccaaatcttggcggtcaatgtgctgatccagatgaggttgatttttaacgataaaaaatatgaaattgatgcagtagtattgggtatccagtcaaataaaaatagtatgctaaaaagtctcgaaccttcacggaagaggcttttttgatataatttcttttagctaataatgaggagaatttgaaaatgaaaaatgcttatcgcgcttttcgccaatactcttgccagttcaggaaaaattggcttgaatatttaatattatttggcggtcttgatattttaaaccagtttctggtaattccattttttcgctggataactacctttgtcctgcaggcaggagaaattccgtttatttcatatcaaaatattgtaattattctgacccatcatccattagttgtagtgatccttttaattgaattaatatgcctaatggtaattatctatggcgaatttatgctcttgttgaagagcttttgtggaattggcttgccagagtttagctggcgccgaatgtttaggcaaacaaaagaaactttatcgttactaaattttggatcgttaattctattattaggttactttttacttattattccatttgcggatatcatctttcgaactcccctgctggcgaaaattcaagttcctcagtttattgttgattatcttacccgtaatgcatggcttattggtggattgaccttgttctatcttttgatgacaatgatcggtattcgtttaatattgacaatgccgttaatggcttatcaacatttacggttaagagctgctatgtctcaaagctggcaaatgacaagtaagctaagatggttgaagtttttaattcaaattgtgctgatgacaataattgtaggtagtataacggttgttttttacctcatgatttacattctccaggttgttttggatttattacccgggaaattatctttgattactgctatctttaacttgtcgatcttacagcttggtggggaagtactagcagtatgggcaggaacaattatcttactggtagtcgttaaccccttaactagcattagtgaactagcgacaactcctgaacatccatcacgaggattgctaacttcctttatgcttgtcttccttgtaatcggcttggcgactcttgcaaataatactttttacatgatgggaacggggattaaacgcccaataactatctctcatcggggagttactgaaaaaaacggggtgcaaaatactattccagcaatggaaaaaacaagtaaacttaagcctgattatattgaaatggatttgcatgaaacaaaggatcaccagtttgttgtgatgcacgatgaaaatcttaaagacctaacaggagtaaataaaacacctcatgaactaacattgaagcaattaacacgactaacagcacgcgaaaatggctatcatgctaaggttgcgagttttgatcaatatttagcagcggctgagaaatatcatcagaaacttctgattgagataaaaacaacaccccatgattcaaaacagatgctccagaattttaatcgccggtatgggaaaaggattttgcaagatcatgaccaagttcactcgctcgattacagtgctgtgactaagctaaaaaatattaatccgcggttaacagttttgtatattcaaccctataatttgggtaatccccagggagttgctgacggtttttcgatggaatattcaacattaaatcaggacttcattactcaagcccagtggcaacataaaccggtatatgcatggacggttaatgacaccgatttaatgaaacagactatgtataaccacgctaatgggataattaccgataatttaggggaattaaatgcggcaataaaagattttactggaaagcagagttatgctaatcgaattctaaattatattattgtcgttcctacaagtgggggaattgaaccgtaaaaaaatactcgagaacagataagccgttaaggcgatcagttctcgagtatttttatccaacgtgatgcttcttcaattgcctaataacaattaacgccactattccaccgatcattccttggataaagtttgaacctaaacttaaaaaaccagtaattacatggtacataacggtattgcagataaagtagattgcaatcattacgattgttccgaccaagattgcggtccatttgccccaggtggtgttgccatattttttataaatccagccactgataaatccttctaaaccatgagcggcaaaggaaaataaggcatcttgggggaagccggaaataaggtcaaggaacattccgccaaagccaccaacaattgtccctgctcctggtcctaaaagcatggcagcaatgaatacaccagcatcacataagttgacgttaccatgtgtccatggaatagggataagaaagaagcggccgaggacaagagttaatgctaataacattgcggcaataattgagcggcgtaaccgaaaagtagattccatattaaaactcctaacatagtcaattgtgagtaattttacaataattttcaaaaaatttcagagaaaaaatgtgtcgttatttatctatcgatacaaacaaaaattaacttaacatcttatatcatagtaattacattgaaatattatgtaataaaactgataattgattttcaactgataatcaatattcctattttatatattgattaaatgaaaataatgcgtataataaattgtgaaaatcagaacatgatatgaggtgtgtgttatgaaggttattattgttggttgtacacatgcgggaacaattactgccactcaaattttacagaatcatccagaaacagaagtcacaatttatgaacggaatgataacgtttcattcctctcatgtgggattgcggtttacttgagcggtgatgttggtgatccagatgcgatgttttattcgagccctgaacaacttgctgccatgggtgcaacagttcatatgcaacataatgtaactgatattgaccctaagactaagacagtcacagtgacagaccttgtgacaggcgaaacaaagaccgaccattatgataagttagttgatactactggttcttggccagtaattccaccaattgaaggtgtagatggccctcatgtttatttgtgcaagaattaccatcatgctaaagaattatttaacgttgctaaagatgcgcaacgaattgttgtgattggtggaggttatattggggttgaattagtagaagcttacactcgtcaaaataaggacgttacattgattgatgggtctccacggatgcttcataaatactttgaccgcgagtatacggatcggattcaacaggaatttgtagatcacggcgcccactttgcttttgaccaacgcgtaactggatttgaaaaccacaaaaatggtgtaaccgttaagacggataagggcaactacgaggcagatattgctatcctctgtgttggcttccgtcctaatactgatctcttaaaaggtaaagttaagatgcatgataatggggcaatcattacaaacgaatacatgcaatcatctgatccagatatttacgctgccggagattcaacggctgttcactataacccaactggcaaggatgcatacattccattagctactaacgctattcggcaaggaacaattgttggaacaaatctctttggtaatacaatgcacgatatgggaacccaatctagttctggcttaaacttatatggaacaacgatggtatcatctggcttaactttggagaatgccaaagaagcgggctttgatgcagctgcggtgacagttgaagacaactaccgtccagaatttatgccgacaacaactcctgtattaatgacattggtgtgggataagaagactcggcaaattcttggtggacagtttatgagtaagcatgatgtttctcaatctgctaacattatttccttatgtatccaggataagcacacgattgattatttagcatttgttgatatgcttttccaaccacactttgatcgtccatttaactatgtaaatattcttggccaagcggcggtaaagaaacaagctgaattagaaaaataataactaaaaaggttagaagagaaaaagttttcttctaaccttcttttttacgcttatttttaaaaatcgccgttcatgattgaatcttttacaatcatataatcgaccttccgaatagcttcaaggtcacgaccacccgagtaagagatggatgattgtaagtcttcctgcatttcggttaaagtgtctttgatggagccacggtaaggaacgagcatctgctttccttcaacatttcgataagcacctttttgaacctcagatgcagaaccccaatattgtttgtattgttttccatcaatgttgatgacatgtcctggtgattcgaggtgaccggcaagcattgagccaatcatcaccattgaagcgccaaaacggacagacttagcaatgtccccattatgtctaataccgccgtcagcgatgattggtttccgcgcggctttagcacaccaacgaatagcggataattgccaaccgccagtaccgaaaccagtctttagcttagtgatgcaggctttaccgggaccaaccccaaccttagtagcatccgccccagcattttcaaggtcgcgaacagcttcgggagttgcaacgttccccgcggttacaaaagtgtcgggaagtttttctttgatgtattggatcattttgatcacaaaatcagaatgaccatgggcaacatcaattgtaatatactctggatttaattgttcggattttagttgatcaataaaattatactcatcatccttaatcccgaccgaaatcgaagcaaataatcctttttcgtgcatcattttaacgaaagctgctcgtgtctctggattaaagcggtgcatcacgtaataatagtcattttggacaagccaaattgctaaatcttcatcgatgacgctctccatatttgcaggtacaacagggatcttgaatgtgtgagggccaaacttgacgcttgtatctgcatccttacggcttttgatcacacatttatttgggaccaactgaatatcatcataatcgaatgttttcattagggcagctcctttttaaaaatttaccgtaattattatgcgctaaaatatatgaagcgtcaatgaaaatagcgtacatttgctgagtaatatcaaaaaatagttcgataaactgttgacgacaatgaattaatccggtaaaatagcgaagtaaaaacgttaattttagaaagtataactatgaggtgaaaataaatgtcatcagttgttattgttggtagtcaatggggcgatgaaggaaagggtaagatgaccgattacctaagccaagaagcggacgttgttgttcgttcacaaggtggtaataatgcaggtcacacaattgcatttgatggtaagaagtttgccctccgtctagtgccatctgggatttttgctaaagacaagttagcggtgattggtaatggagtggttattaatccacctgcattattaaaggaattgcattatcttcaagacaacgggattgacatttcaggtttacggatttctagtcgttcacacatcaccttcccataccatattcttcttgataaatgtcaagaagaggcaaagggtgatcacaaggtgggaacgaccaagaatgggatcggtcctacctacatggataaggtttctcgtgttggtatccggatgtgtgacttacttgagaaagacacctttaaggaaaagcttgaacgtaacctcgctgaaaagaacgaattattcactaagttataccatgttgacccaattaactttgacgatatttttgaaagttactacgaatatggtcaagaattaaagcaatacgttactgatacagctcaaattgtcaatgatgcccttgatcaagataagaaggtcctctttgaaggtgcacaaggggttatgcttgatgttgaccaaggaacatatccatacgttactgcttctaacccaattgcggggggagtatgtactggtgttggcgttggtcctaacaagattgaaaccgttgttggaatttgcaaggcttactctacacgggttggtgctggtccattcccaaccgaattaactgatgagattggtgatcaaattcgtgaaacaggtcatgaatacggaacggttacgggtcggccacggcgcgttggttggtttgatagtgtcgcaatgcgtcatgcacggcgggtttcaggaattagttgtcttagccttaacttgcttgatgttttgactggcttgaagactgttaagatctgtacttcatacaaacttgatggtaagcaaattgattactacccagctagtttgaaggaacttgaacgctgtgaaccagtttatgaagaacttccaggatgggatgaagatattactggtgcaaagaagtttgaagacttaccaattaatgcacaaaactacttgaagcgggtaagtgaattatcagaatcaccacttgcaactgtttccgttggtgctgatcggattcaaacgattatcgttaaggatccgtgggaattagcacataaataaatagatgagagcttctaatgtttgaataatctttaagcattggaagctttttatttctcttggctcccctatggtataatcaaggcaaatacacgttataggaggcaagatgatgacacagccaacactaacagtagaaaaacattatttaaattggccacttaaccgtcctttaaatcaagctgacataatgcatgagttgggtgtgcatgcatccgatgaaaatggccaagatttaacgagtaaggtgatgatgaacctaactcaagtggatgttaacaaagtaggagaataccctgtgatgttaaatgtaatggataataacggacaaagtgcccaggcaagcattaccctaaatattcaaccgatgcggacacagaatgcacctaaggaaactgcaacgtccccaaagtcaagacggggatggttatgggttattatcgtaatcgtggttatcttatgtgcatggtgggcgatcagctctcataaccgacaagcggctaatcaagcggcaactgatagtcagcagagcagtcaaataagcaacaattcaagcagtatcagcgatttaacaaaagataatcaacgtcttgctagccaagttgcagaacttaaaggggcaacccaacaatatcagaaagaccatgatcaacaagcattagaaagccgacttgataagatccaaagtcaaatccaagacttgcaaaatcaagttcaaagtaacagcgtgaagcaagatttaaaccaagttaatgaaacagttaatgaagtacgggaaaacccagataatgggacgaaaattgtcaacaatctaaagaataaagacgactttcaagaaatttggggaaatattagccaagaagtccagaagtggttagacgagtttgctaattagtgagtttgacagcgacaagatagacccttaaaatggtaataataattagcgaggttccccgttaaattgttagggaaagactcaagtaaatgctggatccttccttagattagcggagggccttattcttttgaaagattttaaattaattaaggaagtgacatgatggctcatgagatcttagatggctcaagtatgcaacgtgcattgacccggattacttatgagattatcgaacaaaataagggtgtcgataacttagtatttgttggaattaagacgcgggggtatatttagcaaagcgcctcgccaagcgactaaatcagttggaaaatgtagaaattcctgtggcagcacttgacgtctctctttatcgtgatgatcgtcatgtaccagattatactcaagaaccaaccgtaaaaactgatcaattagatattgatattactaataaacatgttattttggttgatgatgtactcttcactggacggacagttcgggcggccttagatgccttaatggatatggggcggccaaaccgaatttcactagcggttcttgtcgatcggggacaccgtgaattaccaattcggccagattttgttggaaagaatatcccaacagcaatgaatgaaactgttcatgtagcagttgaagaatatgatggccatgaagatgtaacaatcgagcataattaaaagggaaacgagacaaaagcccctgtaagcaataaagacctctatcgttcggttttaccgatgatggaggtctttgttatactgcactatttacttcttatgggcgtaacctaatccttttatcttagctttcgccaccaatccaccgttgaatgctcattaaatacccgggtaccaaattttttctgaaaccatcggacttgtttgggcgtaaatccccgaaatactaatggtaattttttccagtgagaataaagagcatagagaagaaggatgtattgttctttactaatatcatctactggaatctcactaaccatggtcatcgaaatacctgttcccagagcagggaatgtatcgagactaattttgtagatgggattattactgatgttagtggtaaatactattaatgcttgtttttgtcgcggacgataaacttcttcaattcgcttattaatcttgtgaacttggcgtttagttggattgagaattatattacgcatatgaaacctctggtcgaacatttgtttagagaacagtatatcatacttagaaacagaataaatcatgtaagtcttttactgatataattttatttattctttccgttgtaattacactattcttattaatgcggtatgattggattagtgagttcagtattaatcgtgcaggacatctaatgcaaaactggtttgcaatttttggaatggtctttggtttcgtgattttaccgttaattttattctggttaacgcgtcgtgagcgagctgaaaatgacgaacgagtaaaataggagaatagaaaaaacgctcaatgactgcacaaatcattgaacgtattattttagggaataatagtagccgatatcgcacattatctgctactagtaaatgttaagtctaattgaggcgaataactaaaaaacaactattggcaccaccctagaagaaagaacaatttaactttgggagtttattaggatttttgtccttattaaaatgagaaaaagttaaggacactttagcagtcattaagtaataaaattgatctcttcacgaattgcttttgatgttaaagcttcaattcgatgatattttaccaagtaatttatcaatagttaatagttttacgagattatgcactcactgtgtacaagtgataccaagaatacactttgttctaacaagggtattattttactatatttttactaatcgtttatattaagataatatagtttggagtttatataggagaaaaaagatggatattcgtaaaattaatatgttaaatggaattaaggaaggatttattactgttttagatactaaaaaattatcagaatgtactactaatgatattgtaaatagcgctgaaattagtaaaaaactttctacaactattaccaaaataaacaagatcttctccatgaaattgaaaatgatctattgggaggtctaaaagaagctctcgtaattgatcgggaggagctaaaagatgtcaagcatttaccaagtgcagacgaaattaaggaattagcagaagtggcatttaatcatacgttggctttttgtaatgaaaataagcatgcgttgtcaaatttgctttcctcaaatggagatatgcagttttatcaaatgattattgaagtagcaaataatgaatttgatgcgcgagttccatatttgtttggggatataaatattaaagaagctaatgtaaaatcgtcattgccattctcatttattaaaaccctctatatcaatacaattgttaatttgttaatgctttggggtgccgcaccagactctttaagcattaatgaaattaagtcaattgcaggcttgattcaaacaaaatcaccagttgaattgattcaaatttataaatcatatttaaactagaaaatgaggagccgaaaattttttctcggtctcctcatttttattatcaaaaattctttttaaattaattgcccttccaataacgtgcccgggtaagcagttcccgtgaacgctggtcagctggtcgataacccttagtaaataggtgtcggaagtacatcatattatagaaaaagccaaagaaaacagaaggccatgggaattggaacagggcattaagtccaaagaaaagggctaccaaagcataatcgagggttaatacaatcattaaaatgaaattatagtaatccgcgcgaaaaagagctggcagtggcccgaaccaaagagttgtccaagaaaagccgactttggcgattcggatatcccctggtcattaacgattttagcgtaatttggtgggagggggagattgtttaagttaaacggattttggttatcattattgttattaccaaatgggttttgcatatctcgtccacttctttctataaataataatattaacacattgagtgagggataggaaacgtctctatcaggctttcaaggaatgttaacaattatatggtaaactcaaagcgataaccatgaaagggggaatcaaggatgctttttttcctaaacgataatattcaacgaaacaaatcaggaattgagcatgcgcaaattaagcgtctgcatctgtttgaaaaatatcatcaaccagctaagattgttacccggcaatattcgaatgaattacacttggtaacagcagaagcagggattgatgatcgtaactttattaacttgtttgattattttcaggaggcttgtgaggtcccgcaaaagaatattcggattaaagatattccggttaacccccattgggagcacaaggctgatgggattaattataattattatcaaaatggcaaacgtattctctatattcgtcggcgcagtgatactgatcggcgggtaattaatattcaatattttgatcattatggaaagcttctcaaagttagttggtttgacagccgcggttttatctcggtcgaacaactttatgactgggatggaaaaatggcaacggaaaactattaccgtccagatggaaccttagcaatccagctagcccaccagcatgataagcggggaagggaaattaaaacttaccatctttttaattaccatggtcgtgattatcaattcagtggctttgaccagttaacccggtttttcctcgatgagttggtcactgacaagcaaatctgtggtgaaggtccggttggctttgtcgttgaccgagtttatgaactaggctgggcagttctgcacatgaagcaccgggtttttcgggttcttcaactgcataatgaccatgttaataatcctgatgatatgcttcattctacccttaattataactatgattggggacttaagcacctccaagattgggatggggtcattgccttaactccgcaacaacaagaagatcttcaagatcggtttggcaagtttggtgtaaagatctaccggattcctggtccgattgttcctgcggcagttattgataagcatcatgttccttttaaaaagcgaacgaaaaaacaagttgtcatggttgctcgcttgtctcccgaaaaacagcaagatcacctattgaaagcatggccacaagtactagccgctgttccagatgccaagctcgatttttggggatacgctaatgatgattttgataagacgctcaataaaattgtcaaagaggaagcgattaatagttctgtgaccttccatgggtatacagataacgtcaattcggtttacgaagatgcgcaattactcattttgccaagtcgggctgaagggttaccactatctttagtggaagctcagtcccatgggttgccgattattgctaatgacataaaatatggtccttcagatgtcgttattgatcaacaggatggattgctgaccaagaacggtgatattgatggacttgctcaagcgatcattcgcttattgcgagatcaagagcaattagcgcagatgagtgaaaatgcttatgctgatagtgagcgttattctgaaccaaacgtgatgaagttatggaatgaattggttgctgacatgaaggaaaagggggaagagtaaagtgtacttttttgtaaaccaatacttattaagtagcaactccagtgttgaacatgctgaattaaaacgactagccctatttaaaaagcatggtggagaagctaaattggtgacccgtgacttcgacctcgttcttcatgataccatcaaaaaatttggtttaactaacgaccaaattgttaatatgtatgacttttttgcaaacacgactgattaccaaggcaaaaagctccatactgaggatttacctttaccaattgactatcaagtaggaactggaaataactatcgcgaagtaaaagatggtgaccgccttgtttgcgaagttcactttgcggctggaacgattgggcaagttaaccatgttgattactttgatcttgctggtaatatgactcttcgccaacaatatgatattcgtggttttaaggcagctgacgaattttttggtgaagatggacaggaatactatgcgcgttattaccgccccaatggagaagcgtatcttgaacggtattttgtaaaatcggttgaaaataccccaattaattcgctgaatgtcttacgtaattatcaggggcaagatcgcttctttgattctttagaagacctctttattttctttttggatgaattgaataaggcaaatggtgaggataatgtgtttattgctgaccgaccagctgttgcgattaaaccggttcaatcaatgatgacaaaagcaaagaaatttttgtggcttccgatgaaccaggttaacgatggtcagaacttaataaatggtcccttaaatccgatgttgcaaggtcctgttactacggatgcggacaagtgggatggtgtaatcgtcatgactgctaaacaagcggagattctccagcaacaaattcacaatgctgtaccaatctatgtaattaatgggacccccgttcttgctaactatgcgcggattaatgaagctgatcggacaccgggtcaattgatttacgttggaagattggcagaagataagcaaactagtcaactaatcaatatgtttgcgcagattcatcagcaagtatctgaaagtaagctaactttctatgggtatggcactggtgaagatatggataactataaaaaacaggttaaaagccttggattagatgggtcaattgagtttgctggttaccagatatcattagatgaggcatatgatcaagctcaattatttgttgatgcaagtcgaatcgatgcacagccattagcgatgggcgaggccttaaaccatggggtaccagttgtttcctatgattacctttatggaccacgtgaaatggtaatttcaggtaaaaatggtgagatcattcctttaaataaccagggacagtttattcaaaccgtcgtcaaattattacaagaccgagatgaactgcaaagcttaagtactggtgcctatgacaatctagatgaattggtagaagaaaaaacttggaagcaatggcaacaactatcagctatttagtcaaaattggttataatatattcagaagacgaaaagcagaaaataatcaaatgtttttgaagcctttggtcgttatcctttgataatctaaagacggaaaatgagggcggaatgatggataattatcaagcaatgaatttttactatggacttcttaatttgcgtgccggtttttttaaggctgacttatgcgaaatactaatggcgatcgcacagagcgtacctgataaaaatcaacaatcagcaacggcataccatactgtagaagagaatttgagccaagaccataagcaattaaatcgtgatcaagttgcatttgggtcattttatgaagatggtcatattttacataatgtcaaaattaatacccaatcagactttttcctcgatccgacccgggaagatactgtcaagtggcatgttagttttacggttgctaaaaatgtccgtccggccgatcaatttattgttcaactatcgccaaatttgatggttgcgcctaatggtcatcctgaaaagccaattcctgattttagtgatcaaaatgggactgttattgcaatgggagcttatgaccaggataagcacgaacttgtctatgcttttaccaattacgtaaccgagcatcgacaaataattggtgaattagagggagaattagcagttgatcctctaacgactccagagaacgaatttggcttggaatgttttataagtgttgatgattaccgaaaagactttacgattgatatcgactatccagatcttgctaacgacatgtttctcgggatttctagccggatgatgcattttgataaggatcagcagctttttgaggacattatctatgttaatccagcacaaaaagaccttaatcatgcctatattgtctttaatacgagtgatctagtggaagaattatctaatgccatcgtcaaaccgtcaacaatgcggattgagatttatcgtaattcacggggattaaaattacctcaatcatatggggtaaactttcagcgactaagggatattactaatcgattcccggtagtggaaggcgatcaccttgtcgagacaccttatacaatgtcctttgctgataacaagatgcgattgaattttggcgccgatcacacgaatgattcctatattattagggtaattggccaatataatggtgaacttgatggaacagtacgattgcgggctcgtttatttgggatggaccagcaaaatgtttatatgagtaattctactgctgcaacagctgctggaacttcaatgatcgcaagggggcatgctatttctaaggagaagttagcggaggagacagcggacacaacagaagatttgaagcaagacgaacattttgtcaatgtggaagaacctcttgaatctacagcagttgaagaagtgcgagaagaagctgatattccatctgcttctgatggtcaagaacaatttcctagttctcaagcggaagaagatgaaacgccaatcgaagaaaagcaggcggaagctcctgcagttagtggagcagtcggcggggatgaattatcaatctcctttgacgtcactcctcaaacggcaccggcagaggttatagaagaagctgaatcttcagatgacaaagaggagcttactatatctgaagaatccgcagtgtctgagtctgctgttgaaattaaagttagtgaagaggagacaagcgcagcacccctaccaatgccgggacgacgaccaccgcgccggcacagtcgttttcaaaatacaatccggtcgaatcattcgttgcgtcatttgcggagattctaatagaaaaaataaagtgtcaggagagattatcctggcattttatttttaccgaaatgtaatcgcttacataaaatgcttgcaattaaaaataaaggtgttaacatttaattgaagccaagtaaacgtttacattaatggataaagggaaaagtgtagtagttttatggagagaggttttattttatggaaaataatcattggtggaataaatcagttgtttatcaaatttatccaaaaagttttcaagataccaatcatgatggtgtcggtgaccttcgtggaataattgatcgtctcgattacattaaggaattaggcgtcgatgtcatttggttgaaccccatttataagtcaccacaagttgataatggttatgatatcagcaactatgaagcaattaacccgactcttggcaacatggatgattttcaagaattgatcgattgcgttcatgaacgtggaatgaaattggtcatggacttagtagttaaccatacttctgaccaacatgactggtttaaggaatcacgaaagggcaaagacaatccatatcgtgattattatatttggcgtgacggtaagaagggtgaagagccaaataattggggttcctacttctctggcgctgcttggaaatatgatgatgaatccggccaatattaccttcatctttttgctccagaacaaccagacctaaattgggaaaatccgaaagttcggcactctgtttatgacatgatgaactggtgggctgccaagggtgtcgatggttttcggatggacgttattaacctaatttctaagccggatggattgcctgatgctaacaagaacgaagacgagaaatacgccaatgttgaaccgttagtatcaaatggtcatcgcattcatgaattcttacaagaaatgaataagaatgttatgagtaagcataagatggtgacagttggtgaaacaccgggcgctacaccggaagatgccgagaagtatgccagtcttgataataaagaattaaatatgattttccaatttgaacatatgggccttgatagtaatcctaatccagcccttggcaagtgggatgatcgcaagacgacccttaaagacttacgggcaaacttaacgaagtggcaagaaaaattgtatggtaaggcatggaattcactttattggaacaaccatgatcagccacgcgttgtatcacgttttggtaatgatcagacggaagattaccgggttaaatctgccaagatgttagcgactatgacccacatgatgcaaggaacaccatatatctatgaaggggaagaaattggcatgactaacgcctatttcccaaagcttgaagattacgtcgaccttgaatcgattaatgcctatcaccaacttgttgatgaccaacatttacttgatggcaagacaatgatgaagtacattgcgatccattcacgtgataatgcgcggacaccaatgcaatgggatgatagcgaatatgcaggattttccgaccataccccatggaaaaaggttaatccaaattataagcagattaatgtcaaaaacgcattagctgataagaattcgattttctattactatcaaaagttgattgaactacgacacacgatgccagtaattactaatggaaagtatgcattagttcctggtaatgaagatgatgaacaggtctttgcatatactcggcaagatgatgacactactttgttggtaatcttgaactatactgatgagactgttaaccgccattataatgtgccagctgatgcgaagttactaattagcaattatgaggatgatcaaaatggcactatccggccatacgaagctaaggtttatcaatactagagtggggatgaataatcatggataaatcacgttcgaattcgaaacaaaaagttgaaacgaagcaggttgatctggatacagggatgccagatttgccaaagaaagagctatttgcgattacatttgcttttctgggaataaacatggctttctcactgcagagttcccagatgagtcggatttgtcaaacgattggggcaaatcctaacaatctaggtttcttcttcatttttccaccattgatggggatgattgtacaaccgattatgggaaagatgtcagatcggacatggaatcgctttggtcgtcggttgccctacctattatttgggactccaattgcggcattagttttgatcatgctaccgttctccggttcacttggcttcggctatggttcaatggctgcgatgatttatgctgcggcagcggtatgtttgatggatttatttagtaatatttgtatgcagccatcacggatgattgttggtgacatggttaataacaagcagaagaactttgcttggtcatggcaacaggtcttttctaatggtgggggaattttagcaacgatcttaccatttatctttacgatgttcggaatgtccaatactgcaaaacgaggggtagtgccaaataccgttatctggtcatacctttgtgcagcggcggttctcctgtttactggactatggacggtctttaatgttaaggaatatgatccggaaacatatgcaaaataccaccacattgatcccgaagaacaaaataagtcagtcagcctttggaaattaatcaagacggcaccgcgcgctttctgggaaatcaacttggttcaattgtttagctggtttgcgatcatgtacgtttggacatacacgactggaacctgtgctcgtaatatttggcatacgtctgatgttacttctgctggttatcaagctgccggtaactggtatgggattttaactgctgtttatagtattgctggtattgtttggggattaatttatgcccatgccaaggctggctcacggaagaggtggtacacatttgggatgatcgtcggtggtttagggttagtctggatgacctttgtcacaactaagactacttcaatcattgcaatgatcatgtttggaattggtaacttcagtatcaacacgattccatttaccctcctcacttcatctttaaacggtaaaaacgaaggtgcctacctcggactcttcaacgttggaatctgtgtaccgcaaattgttgcatcgttatgtagcttcttcctcttcccacttgttggtcacaatcaaccaatgatgcttttgcttggtggcatctccctccttattggggctttagctgtccaagcaattcatgaaggggtaactgttaaagaagtgtagcgctaattaaatctctccttaatataaaatagttaaaataaaagcgggactggaaatttatccggtctcgcttttgcaatctatttaattgtgatggcttccaaagattgatcttctttaacgtgcagcaacgcattgactgtatcaagtgaagtcatgaggggaacattttgcgcgattgtactttggcggatctgaaagccaagtgaatcttgttcataatcatggcgcatagtgttgataacaagatcgatttgcccggcttttaagagtcggttgagttcatcaatgttagatattttttgatggacgtgaatgccgttatccttaaagtgcgatgctgtttgtggggtagtgaaaatttggtagccaatctgagcgaaccgttttgctagtgggagaatgtcttcttcatccccattttcaatcgtaaagagaattttgccattgttagggacttgaacgtgtgctccagaaaaggctttatgaagtgctttttcataggtggtatctgtccccatcacttcgcctgtcgatttcatttctggactgagataagaatcaacgttcgctaacttgttaaaactaaagacaggagctttaacatgaatggtttgtggttctggataaagaccgttagtaaaaccttgatcagcaagtgactggccaaggataactctggtagcaacttgggccatttcgattcccgtaatcttgctgaggaatggcactgttcgactagctcgcggattaacttcaaggatgtacacttcacgattatgaacaataaattggatgttcatgatgccaatacatttaagagcaactgctaatttttcggtagcagtaacgatttgttgtttaatgtcatcatcaaaatgttgtgggggataaactgccattgaatctcccgagtgaacgcccgcatgttcaatatgttccataattccagggataaggacgtcttttccatcgcaaattgcgtctacttcacattcccgtccttcaaggtaggcatcgattaaaatagggtgatcagcagtaatggaggcgttttgttgaaggtattgttgcagttcttcttgattataaacagtctccatggccttaccaccgagaacataacttggacgaacaagaacgggatagccgatttttttagccgctttgataacggcagagtgagtagttgcggttaaaccgattggctgcttaagatttagatcagtgataactttatcgaatacttctcgatcttcagcagcatcaaggtcgtcaacggttgttccaagaatattaaccccatttttagcaataccttctgctaaattaatcgctgtttgtccaccaaattgcacgatcacgcctactggttgttcgagatcaatcacgtttaggacatcttcaagcgtgaggggctcgaaatagagtttatctgagaccgagaaatctgtcgaaacagtttctggatttgaattgatgacaattgcttcataaccagcccgttgaattgccttaacgctatgaacggtcgcatagtcaaactcaactccttgaccgatccggattggccctgaaccaaggacaaggatagatggcttctttgtccgttggctttcattttcatggtcatatgcgctgtagaaataaggggttgaagaagtaaattcagcagcacaggtatcgatcatcttatatacggggagaatttcattctgttttcggaatttccgaacttcttgtggggaagtatgccaaaggcgggcaattgttacatcgctaaagccatattttttgctgattatcagtgtttctgcatcaaatggcttggtactaagatcgtcttcaagttccaccaagtgtttgacgatatcgaggaaatagggggaaatcttagttaagtcatgagtttgcttaagggaatatccacgccgaaatgcttctgctaaataaaataaccgatcatcttggggataacgtaacttcttttcaagcatatctgttggcgcatgatgagcttctgctgaaaagaggtctttttcatcaatttcgagtgaacgaacagccttatggagagcttcctcaactgtccgaccaattgccattacttctcccgtggctttcatctggctgcccaggtgtcgatcagcctgagtaaacttatcaaacggccagcggggaattttgcagacaacatagtcaagtgccggttcaaattcagcaaaagttgtcttggtaacgggattcttaatttcatcgagggtaaggccaaccgcaattttagcagccattttagcgattggataaccggttgccttggaagcaagggcagatgaacgggaaacccgcggattaacttcgataacgttatactggaaactttgcggatcaagagctagttggacgttacatcccccttcgattttgagggcacggatcagcttgagcgcgcaatcacggagcatctgatattcgcagtcgctaagggtctgattaggggcaaatacaatggagtcaccggtatgaattcccactgggtcaaagttttccatacaacaaacgaccattacattgtcagctgaatcccgcattacttcaaactcgatttccttataacccgcgattgacttttcaattaaacattgggtgacaggggataattccaagccattcttggcaacagtacgcatttctgcatcattatggcagatcccgccacctgtaccacccatagtaaaggcgggacggacgattactggatatccgcattggtgtgcgaattcgactgcttcatcaacagtattaactgtctgtgaagccggaacaggttcaccaagctcattcattaattccttgaatttttcacggtcttctgcttcatcaatcgaatccagcttagttccgagaagttcaattcctaattcgtcgaggagaccagttttagataaggagacagctaagttgaggccgatttgtccgccaagggttggtaaaattgcatcaggatattcttgacggataattcgagagagggagtcaaccgttaatggttcgatgtagacatgatcagcaatttccttatcagtcatgattgttgctggattagaattaacaaggatggtttcgtatccttcttcgcggagggcaagacaagcctgcgtgccggaataatcaaattcagctgcttggccaataataatagggccagatccgatgacgagaattttatgaatatcagttcgtttaggcataggtgagggcctccttattactgtcaattaatgccatgaatttatcaaaaagctgttcagcatcgtggggtcctggcgcagcgtctggatggaactgaacggaaaatgcaggatactttgaatgctggagtccttcaactgtgccatcgttcacttcaaggtgggtgatttggaggtcagtatcatcaatggaggatggatcaaccgcaaaaccgtgattttgagaggtaaatgcgatttttcctgttttaagattacggacaggatggttaaaaccgcggtgaccaaatttcatcttataagttttagcaccattagctagggcaaagatttgatggcccatgcaaatgccgaaaatgggcacatgtttttctaattctgcgacagtttccgcaatagttgtcatttcaagtggatcaccagggccgttcgaaaggaggatgccgtctggattgaacgccattatttcactgatcgaggcgttataaggaaggacaattgcattgcagtttcttttatttaattcacggagaatgctatttttcattccgaagtcaagaacaactacagttcgcttagttcccggattagcgtaggattctttagtagatactttgctaataatgttctgggttggcgaagtttgttttaactgttcaagcttatctttgatatcggtaacattatcggtcataattccgcgcaatgttccatattgacgaagcttacggactagttcacgtgtatcaattccttggaggccaggaatgtggtgctttgctaagaaattagggagcgagtcagtcatgcgccagttgctgggaacacgagcgacatgatgacaaattatgcccttgatttggggatacaatgtttcgttatcttcactattaatcccatagttaccgatgagaggattggtaaagactaaaatctgattggcaaatgattgatcggtaattgcttcttgatagccgaccatccctgttgtgaagacaacctcaccaagagttgccttggtagcgccaaaaccctcgccggtatagacagtaccatcttctagaattaaatatcgtttcatgagtttcatcctttcttgcaaaacccttccactgatcacataaactagttgcacgttgtaaaaaagtttaataaaaaacgcttaaaccattggtaatgggcttaagcgtatacgaaaaattgaatatatatgtataattcaatgttagtaatacaacgctgcccttgttagcctcacgggaccaaattaaaggataatgattgatactaaactactgtaattttatgcttttgtcaagtcactaatgaatttttatgcaaaaacatgtttattataaacaaaaaactgcataaaggattttaggtattataacaaattttatttaaaataaaagtaaagtctgcaaattttgtctgcaaactctacttttttagaataattaggcttggtaagtttccttgataaagagaactgaaattgcacctaagagagcagaaataccggtaacaagcatcatgttgacttgggaactaccaagtaatgggaagagaccaaaactaagtagtgaggcaaccatttgtggtacacagattgaaccattaaataggccaaggtaagtacccatgtgtttaccagataaggcatttgtaaccattgttaatgggtaggtgttcattgaagcccaagcaattccgatcaaaacgaaggagaagataagggcgttttgtgaatggataaagaagattgatgtgtatccaacagccccaagcaaaagactgaaagcatagccagctttgtggtggttattaggaactttagccagaacatatgaccatacaactgctgcaattgattgaacagcggtcataacaccgtaccagttaccggcagcttggtaggcagcagaagaagcatccgttgttaaccaaacattcttagcgatggccccgaccgcataagttgaaaggtattggaaagagaaccagcagaagaattgaactaatgcgacattccaaaatactcgtggagcatgctttaagagggtaaaccagtttccaccttttttattgtcttcctctgaaataccatggtaacgagcataagttgcgggatcatattcgtgaacccggaagatagtaaagagacaggtgatgactaaaataacagcgccaacgtagaacgaaattacaactgattgaggaacaacaccctttttagcagtgtttgatataccccaccatgtcaaaaggaatgggaaaatggctgctaaaacggcaccggtattacagattaaactttgaatcccgtatgcataactcttttgatcatcgttaaccatatcaccaaccatcatcttaaatggctgcatcgccatatttgatgaaagatcaaggaaggcgacggtaatagccccaaaccagagggctgctaacgaaccgtatccaaatccaaaacttcctgaattaggcagtaaaatcataacgatgacggcaatgaccatcccgattaacaggtaggggagacgccgaccaccaagttttggcgcccatgttcggtcagaataataaccaatgattggctgcacgatcaatcctgcaagtggcggaagtaagaagaaccatcccaaattattaggattagcaccaattgtttggaagatccggctcatttgtgaaccttgtaacgtaaaggcgatttgaaccccaaggaaaccaaagttaatcatccagatggtactctttggtaaaattggcaatccactcgtcgaagtttcttggtcttggttaagtacgacagactcatcttgactcatgaaaaacaactcctaacgaaaaaatgtataaaataattgcaattcgagcttgtgtaagctcttacacgaataatataacaaacttatttcatttgtgcaaccgcttgcaaaaaagaatagtaaaaagtcgtgatctgtttcaataaaaagatcacgactttttaatgctctaatgtttcttgcctaggagtcttacgctatttcgcggtgtgatatggattggaataaattgtgagtcatcatcgttcaataggctcctaactgcgatgagtcccatttgataaaagtcctgagttacgcttgtaatagttgggatggtaatatcacagagaaaagtcccatcgatactaataaatgataggtcttttggaatatcaaggcctagcaaatgagcctctctgatcatgcccacagccaccatatcactagctgtgatgatcgcgtcaagattcttattcattagtgttttgagcatattttgctgaggaccaaaactgtaatccccatattcgacccatcccatatgagggattaatccgtgttcagtcattgcccgttggtagccttgaagtcgttgcttaccggttgaagaacgatcgatgccggctaatccaatccgtgagtgtcctcgttcaattaaatagttagcggctgaataaccaatttcctcgttatttgaacttgtaaatttaaatccaatatatcgggaatcagtttcgtcatagaccgatactaaccgacaaggggtattgctttcttgtaaggtgcgagctgcttgttcgtcgagggaggttgcgactagcagaatgccggcaacatgccgttcgagggcaacgctaattgcttgattaagcagtcgggcgttatggtttccagcgtaaagaataaacatttggtaaccagctttatctgtttctgcttgaatagcagcgatgatatcatttgagaaattcgtttgagtattatttaagataacggcaattaacatactactattggcagctaattcagccgctgcaaggtttttcttgtatcctagttctttagcgattgtttcaatcttagccgcggtttcgggacggtaggatttcgcctttttggataaaacacgagaaacagtggccgttgaaacgtgggcccgttgagcaatatctttaattgttggcttcatagacggacttcctttattgttttcttattaaacctattataatgaaattgcgattttttgtaaacgctttcaatgggggcttaatcattatttaaaacaaaaataggccgaaagaaaaattcttccagcctacatagctattctttatttccgtttcgtaatgataatttcacgactgcctcacagcgtgctgtttggggcatcatgtcaattggttgaatgtagtcaacgtgatagacactagttaaccgccgtaaattacgggcaagagaagccataccacatgagacgtaggcaaactttcgcggcttaacttttaagatttgcttgattaattggtcatctaacccggttcgcggaggatcaacaacaagggcatcaaagttgagtccttctttttgccagcggggaagaacttcttctgctttgccgacttcatatttagcgttagtaatattatttagcttggcattttcgttagcatcagccaccgcttcggggatgatttccattccgcaaacagattttacccgcgatgcaagtgaaaggccgattgtcccgatcccggcatatgcatcaattaaggtatcatctttgtccaattcaagggctttagaagcttcttcgtacagcacttctgtttgttcaggatttagttgtaagaatgaacgtgctgagagtttgaaatcgagtcccatcaagctttcaaggattgaatcttttccagcgaggtggatcattttatcaccccaaattaagggtgtatcacctgggttaacgttttgcataactgaaacaactgctggtagttctttttcaatgcgttcaagcaattcgcgtttgtgaggaagtttagcagaattagtaatgaaggttaattggacttccccagttgaccatgattcacggactgctaaggttttgatgataccgctattgttcttttcatcataaactgggatttgcaagtcttcgatcatcttcgtaactgctcgaactgtctccattgtacggggcatttgaacagcacaagtctccatatcaacgagggtatgactgtttggctggtaaagaccggctgctactttgccattgaccattcggatttgaaactgggccttgttacggtaaccgtattcttcaggggctgcaatagttgggcgaacatcgtaattacggtagccgtatggttgaaacttttcgagactatcgatgattacttgccgtttaaactttaattgttgttggtaagcgaggttttcaagttcaaaaccaccagcgatatcagcgtactcatctcgtggcgttacccgatcccgactctttttccggatccggtgaattttagcttcaagatagcgtgggagaacgcgtgtaacttccgcgactacgacttcatttggcagggcaccagggacaaaacataccttgtgcttatagtagccgattccgtgcccgttaacgcctaggcgacgaattgtgagggggaatcgtttcccaacccatacatcaacatcttgttcatgttgtttagtttgtgtcatattatttctccgttctattaattcaatgtgttgactattttagcacatctccaaataccactggacaaatatgtcagagatgaaaaatcgcgtaattaattttcggaatgataacttagccaaacttatagtcaattattatggaaatagtcaattaagtgtgcatattactaataatatgttttttgaatgagtaaaattatagtagaataacaatgtgaaatgttgcataaataacttaaaggaagtgacacgtttgaaaattgctgcaattgccgggtcaaatgctaatcattcatacaaccggatgttattagaatttattgcccgtcattttagtgatgatgatattgatgtgattgatattcgtcaagtgccaatgtttaatgaaaattataagggaaagattcctgaggctgttgctgatattgatcgtcgtgtttcaagcgccgatgctgttatcattgccagcccagaatacaaccactctgttacctctgctttaaagtgtgtaattgaatggctttcctatgaagttcatccattagaaaataagccagtcatgatcatcggtgcttctacccatgaccaaggctcatcccgttctcaagttcaattacgagatattttaatctcaccaggtgttaatgcttatattttccaaaacgaagagttctttatgagtgatgccgctaatatcattgataaagatggtgacattactaacgaaacgactattcatttcttagaaaaatgtatgcgtgaattcaaacactacgccaaggcaatcaatcgtatggttgctgaaaagaaggaggcgaagaagtaatgaaaatccttgctttagttggaactaatgccaatttctcatataaccggattttgcttaaatacatgaaaaagcacttccgtcaaatggctgatattgaaattgctgaaattagccaattgccaccatttagcgttgatacccctctttctgaacaaacagaggtatggaagttaaagcaaaaagttaaggctgcagacggagttattttctcaactcctgaatatgaccatgggattccagcagccttaaagagtacagtagaatggctttcttacaagactgatgtattaaaacgcaagccagttatggttgtcggtgtatcttatggacgccaagcttctgcaagatctcaagttcaaatgcggcagattctggtttctcctgattgtgatgctaacctattaccaggaaatgaagttctgattggtaatgctagtcattccttctccaaagacggtcggttaattaatgccgaagcacgtgataaccttgaaaactgctttacccattttgtggaatacattcaaatctttgaaaatgcaaataaggagggactggatatgtccgttaaacaaccaacgatcagtgaagcttacattaatttccctactggtcggttgacattaaaagaagttcaacaaatcttcagtacaatcccatttgaaattgacttaattgacagtactgaccatttcgcatggttctctgacaagccaaatcgggaacacgttcggaatgtagcttctctcggggaaactgttcaagaatgtcatccaccgttggctgttccggttgttatgaagattattaacagtttccggaatggtgaaaaagacgttgttacccgtccattatggatgaatggtcaccgttcattgattcaatactacgctttacgtgatgttaatggtcattaccttggaaccatcgaatttactggtagtgtggaatacattcttaacctcttcgaaaatggtgcatggagtactgatggtaacactggtgcatctaagcatgaggatgctaatgacaacagtgaagaagctgacagcgttgatgcatcaactggtgcttcagaatcaagtgatgatgataacaccgacaatgctagtgaagtggttacaaccccagcaccagcaacaaacgatgatactgatgcggacgctacaacaggcgtatcagatgcaggcagcgtagacgcaaatgatgatgaggcagatgctacaacaggtgcatccgaaaactagttatgaataatgaattgatggcgcagcggcatgtgatgactcatcacgctctcggaactcgcataaatttaacgatttttggcaacaaatacttttcattgttaaagaaatcaatggacctaattgaccactatgaggaccgattaacggttaaccgtaatgaatcagaagtgatgtcggtgaaccatggtgcagggaaaactccgaaaatggtatcgccaacgacttttgacctcattgagctggcagtgaaatatagtcgtgaaaactttggctttaacgctttgattggcccgttagtaaaattatggaaaatcggttttgcaggggcgcacgtgccaagtgatgctgagatcaaagagcggttgaagttgatcgacccttataaagtattgctgaaccgagaagcacggacggtatatttagaagagccggggatggaattagaccttggcggaattgcgaagggctatattgcggaccgtattcgggatctttggattgaagctggagttcccgcgggaattatcgacttaggggggaatctcttatttgttggtaagtcgccacggcgggatgatgggcagtggatcatcggtgtgcaggatccgcaactgcatcgaggtgaaaatttggcaactgtccgcgaaccggcttgttcggcagttacatctgggatttatgaacgatttttgatcaaaaatggtcgtcgttatcaccatttactagatcctcggactggatacccattagagactgatttgagcagtgtgactgttttcactgatcaatcggtaatgggtgaaattgaggctaagcgactcttcttcaatggtgaaccaatcacaggctgggaagtgcgtcctggtaaccgtggcgctatctttattcataatgatgaatcaatggtaaacgttgggctgaataaaaattgatttcatttaagcgtaggtaaacgaaatgtttacctacgcttttttgttaatgcctttagacctggttgagtgcgcgagcagagcgagtgcacgaaacaaaaaaacacctgctatgcgggtgggcgataaaaattatataaaaaaggcctcttttgccttaagatgtaggtgttcaagccaaagccaataagggaaaagaggttatataaatatggctaataaattaaatagcttagcccatacgaagtggttatgtaagtatcacatcgtattcataccaaagtatagacgtaaagcgatcttcaatcaataccgaacccgagagattatattcgtttattgtgcaaatataagagagtagaaataattgaaggtcatatgatgccagatcatgtgcacttgttagtaagtattccgccgaagctaagtgtctcgtagtttatgggatacttaaaagggaaaagtgcattaatgatgtttgatcgacatgcaaacttaaaatacaaatatgggaaccgacattttttggctgaaggctactatgtgattacagttggattaaatgaatccacgataaagaagtatatccgagatcaagagaaacgtgatatatcaatggataagctaacaagtgtggaatattcggacccttttaagggtaagtgaggtagtacaaacaccgcttaaagcggtggcaaagtagtcagagcattttggcttgagcaaagcgaaagccagcgccttgagacgccggcttttattatcggcttatagccgatgtgcaaaccacccgtttgacgggtggttatgatttgtgtgcgcctggcatggatattagctaggcggtgaaagtccgctatgggccgtagtagtcggaaccatgagctgatgacaagggtgttcattgtgaagtagaatctgaaggaagtctaaggcaaagtactgcaccgatgaataagaagtagctataaggctgaaggtaactggataaggttgcacaacaagctgaagtccaatactactcgaagttactctcagtaaagctaacggtgacatggtacgaaagttaatgttcttacccggggaggcctgacttacacgcttccgacaagaggaataagataaatttccacagaagcaagcggtagcccaagtattaacgcccatctttgagcagattttctcggatagtagctttggatttcgcccacatcgtggcgcccaagacgcaatagcgaaggtagttgatctttataatcatggttacaaacgtgttgttgacctagacttaaaagcctactttgacaacgtaaaccacgatttactgatgaaatacctccagcaatacattagtgaccgatggatattgagactaattcgtaagtttcttccgagcggagttctagatcatgggctttttgcgtgaagtgaaaaaggagcaccgcaaggtggaccgctctctccactattggcaaatatttatctaaatgagttggataaggaattgaccagacgtggtcaccaatttgtacgctatgcggacgactgtaaaagccaacgagcaggggaacgagtgatgcaaagcattacgcagttcctagaaagacgattaaaggtcaaagtaaatccagataaaagtaaagttggtagccctttaggcttctcattaggtgtaaaccagaatggtgcttacgcgcgaccagctaaagaatcacaaaggcgagttaaacacgcgttaaagcaattaaccaaacgtaatcgaggagtctcaattactagaatatttggggaaattcagcgaaaaatgtgtggatggctccaatactattcaattggtaaaataacagcgtttattcaacgattagactaatggttaaggacacgcatccgacaatacatctggaaacagtggaagaaatttaaaacaaaagtcactaacttaaagaagttaggcatgtcataccacgacgcgtataaattcgctagtacccgcaagggatactgacaaaccgcgcatagtaagacactaacttactctcttgaaaatgaaaaactggaacaactcggactaatgaatatgtccaagatgctctagtcaattcaatgtgattaagttgtcgaaccgccgtatacggaaccgtacgtacggtggtgtgagaggtcgataattgaactagtcaattatctcctactcgatttgacagattgataatgatcgaacgataaagaaaggcagaggagattggtacatatgatcattatttcatttataaaaagtgaataaaaaagagggtatgctgctttaatcttcctcaacggttgatataatagcattgaatgttaaattttctgatgataaatcagttgaaaaaaactgttaagagtgtagaatgacaattgaaagttattactaaaatgttgatattaaaagatggcgattaatcatcatttaattatcagctttttaataaaatgaagttttttaaattgctagtttagccacttgtttaataaaagattggttgtaacttgccagcaggtatcaccattcatctgatcgacagctacagatgaaatgccacctggtagtgatctttatggttgctatttatctcaaggagtactttaccttttatttataaaatggtttattgaatgacttaacttactccaaaagatagtggtaagtagtgccaggtggcttgggataatttcccttaaaactggcggatataggctattatgataacctaaaagaggcgacccccgatgcctatttaggctaattataatagtagctgtcgcttgactggatagtggtaaagccaagttattaagtgttaagcaacaatttttgtgcattgtttgttgcgactactactccctaatagatataaggtttatagccttatatagtaggtatcataaatggttgaacgctgtttagataaatttgtcaaacggtagaatgataatgcttataagaacccccgaatacttaactttaagcatgagtagcaatatctcccccagataacttaaaagtcttattgtctacgccaacagcaataagcagataacagtttagttttatcatataagtgtatttgctactaaaagttttttactgttcatgacaattgtgctaaacaacgattcaacagtacacctagtactagtgatacctgaaaagtcggcacagaaattacaacagtatggtaaatgtgctagcctactgtagtaagccgcttggtggtaggttttaaatgttgaatggtggatttatcaccaaagttagttgtgcgtaaactaaccaaaaattcaattgataaattaggaaaagtgtaataagataattgcaaaatagaaaacacgaatgcattttaagtaggttgttcagagaagcagcggatggtgagagctgtcgaccgaaactccggtgcaaaaatatgtgggcaggtaattctgcacggatagtagccgttatctacttcgaagggtgactaaagatagtcaaacttgggtggtaccgcggaactagagccatttcgtcccaaaatataaaggatggaatggctcttttttatataattaggaggaaatacgatgttagatattaaaaagattcgtcaagaacctgatttttataaggaaaagttagctacgcgtggtgtaaaaccagaagaaattgatgaagttattgcgttagataaaaagcgacgggaattgctccaacaaactgaaacaatgaaggcgcaacgtaatgaagcatcaaagaagattggagaagctaagcgtaatggtgaatctgccgatgctgccattaaggaaactcgtgaacttggtgataagatcaaggaattggacgctgaacttgaagtaaataatgctgaactccatgataagatggctcatcttccgaatgttcctcacgatggtgttccagttagtttaacggaagacggtgccgttgaattacggagagtgggtaaggttcgcgactttgattttgagcctaagcatcactgggatattggtgaaaatcttggtattttagactttgatcgcgctggtaaggtttctggtgcgcgttttgtctactacttagggcttggtgctcagcttgaacgagcagtttacaacttcatgcttgatgaacacatgaaggaaggatataccgaagtcttaccaccatatatcgtcaatgctgattcaatgtacggtactggtcaattccctaagttcaaagaaggagtttaccaagttaacggtgaggatatgactttgattccaactgctgaagttccattgactaattactaccgtggcgaagttatcccaactgaagaattaccagtttacgttactgctttaacaccatcattccgttctgaagcgggagcagcgggtcgtgatacccgaggattgatccggatgcaccaattcaataaggtagaaatggttaaatacactaagccagagaactcatgggatgaacttgaaaagatgacggctaacgctgaaaatatcttgaagaagttaaacttgccataccatgttattaccttaactactggtgacatgagctttactgcatctgaaacccatgatcttgaattgtggatgccagcacaaaataagtatcgtgaagtttcaagttgttcaaactgcttggacttccaggcacggcggatgcacacacaataccgggatgaaaatggtaagttacaatatgttcacacacttaacggttctggtttagccgttggtcggacagttgcagctatcttggaaaactatcaaaacgctgatggttccgtaacgattccagaagtattggtaccatacatgcatggtgttactaagattactaaggaaaatgcggttcctttccgtaataaagttaataaataagatatatagaagacagtttttaaaaagaagttcggattgctaaatctgagcttctttttttgattaaaaaaatctaagaaaaagtgaaaaataaataaattatacttaataaaattaacttatcgctggtcgctctctttaaaaattattgtttaaaacgctaacatcttggataaacacaaactttgatgaagaatatttattttgttttctagcgatgataaagtagtatcaacgttaaaatttgattaaaaaggagtcggtgcagatgcatagcagcaagataaaaaatatgatcatcaccattgttgcagttcttggaattgtagtggggtggcaaatggtcgagcctcagcaggtatctgctgccgaaccgacttatacgtttgcaactaataacacctttgaaccctttgaaattcaagatagtaaaggtgggtactcaggaaagaatcctgggattgaaattgaaatgcttaagaaaattgctaagcatgagcattttaagtatgaactgaagtcaatgagctttaatggtgacttacaagctcttgaagcaggacaagttgatgcagtaattgccggaatgagcgttactgatgaacgaaaagaaaagtatgatttttcaacaccttactatactagtggggttgttatggctgttgcaaaagatagcaatattaagtcgatgagccaattaaaaggcaaaacagtttcagctaagtcaggaacgagtgcggcattatttttgaagaacaaccaaaagaaatatggttacaaaattcgctactttgattcctcaaatacgatgtggaacgatgtgaagactgggaatacagcagctacttttgatgatggccctgttcttgaatacggaattaaagaaggtgtcccacttaaggttgtgacaaagaagccaattgatgcgcaaccagttgccgttggatatcaaaagggcaagaacttagaattacagaaaaaaatgaatgatgggatcaaatggctaaaagatactggtcaaatggatcaaatcattgataaatatactaagagtgacaaaacaacgaaggacagtgcgactgatcggacaatcctgggattaatccgcgccaattatcctgccttgcttcgtggattatggatgacaattgaattaaccgttgtcggcattatttttgcgatgatttttggggtaattttaggtgtattaggtattgcacaaaacaaatttgccaatgctgtttctagtaccctgatttatatcttccgtggtattccaatgattgttttagccttctttatttacatggggattccaaatgttattggccataaagttccattattcttggcaggaatcttaaccttgacttttaacgaaggggcctatattggagccattgttaaaggtggatttgaatccgttaatattggacagtgggaagcagcgcggagcttagggttgccatatagcaaagccttgattaaggttattgctccccaaggatttaagttaatgattccttcgttagttaaccagtttattattaccttgaaagatacttcaattctttccgcaatcggtgtaatggaacttacacaaacggggactgttatcatttcccagaacatggaaggatttaagatgtggttaattattgggacgatgtatatcattatcattaccctgttgacttggttatcaaactacgtacaaaagaggatggcttaatatggataaaaactataaagtacaagtaaaaaatctgcacaaaagttatggaagtaatgaagtgctgaagggtattagcttggacgtaaaacccaatgaggtggtttgcatgattgggccatcaggatcgggtaaaagtacctttcttcgttgcattaataagcttgaagaaccaaatagcggccatatttatattgatggctacgatattgctgatccgcaagtaaatattaataaggttcgggaaaatatcgggatggtttttcagcactttaatctctttccaaatatgaatgttttggagaatatcactttggcacctattcaacttggcaagatgaccaaggaagaggcagaaaaggacgcgatgcactatcttgacttagttgggctggctgataaagcgggggcagatccaaccaagctgtctggaggtcaaaagcaacgggtagccatcgcccgtgcccttgcaatgaaaccggatgtaatgctctttgatgaaccaacgagtgcccttgaccctgaaatggtagggatgttttggaagtaatgaaacggttagcgcaagaaggaatgaccatgatcgtggtaactcacgaaatgggatttgctaagcaagttgctgatcgggtggttttcttccataatggtgatattcgggaacaaggcaccccagaagagatttttgataatccacaacatccagatacgaagaatttcttggataaagtgctaaatatttaattatcgactgacttttagtaatttaaatttgacaaagctagaataatcattataataatgagtaacttctaataattggttgacagagaatctagcatttgctgaaagctggatccaattaaatggcatgagcgtttgaaatggagtagtttccttatcaaccgagaggtagtttgcaaatgtgagctataaagatgggtggaaccgcgttaaaaaacgtccctggtagatgattaccagggacgtttttatttgtttaagaaaacgtttttgttattaactaaatttttaaggaggcatattatggacgaaaaacaacaacagaagttagaacgatcgcttaaaagtcgtcatgtgacgatgattgctattggtggagctattgggaccggtctttttcttggatcaggaacagccattcaccaagcaggtccatcaatcattctttcatacctgatcgtcggtatcttttgcttctttatgatgcgggcgttaggggaacttattttagctgatacttcaaaacattcatttattgattcggttaaggaatatcttggtgaccgaatggaatttgttgctggatggatgtactgggcatgctggctaacattagcaatggcagatcttactgctactggtatttacttgaaatattggttccctaatttaccacaatgggttggtccattaattattgttattttattgatgttagtaaacatggtaaacgttgggctgtttggtgaactagaaagttggttctctatgattaaggtgattgcaattttagccttaatagcagttggcgcggtcttacttgtgatgcatggtcatgttgaaggacggccggtaactctttcaaacctagttaaccaggggggctttttctctactggtccgatgggcttcttaatgtctttccaaatggtagtttttgcctttgtgggaattgaaatggtcggtttgacagctggagaaactaagaatccagataaagatattccgaaggcgattaataccttaccagtccggattggtttattctatatcggatcaatgattgcgatgatgtcaatttacccatggttccatattaagactacttctagcccgtttgttcaagtgtttgcagcaatcggtgttccaggagcagctgcgattttaaactttgtggttttgacagctgcaatgtctgcaactaacagtgcgatctttagtactagtcgttccctctactcattagctcgaagcgggaacgcaccaaaacgttttggtgaattaagcgcgaaggcagttcctaatcatgcattaactttctcttcattgattctttttatcacagttatcttgaattatattatgccagcgggaatattcgatgtgattgctggaatttcaacaattacctttatttttacgtggatcattattttggttgcacatattaagttccgacaacaaaatcctaagggagttgcaaacttcagaatgccaggatatccgattactagttggttaacaattattttcttcttggcagttctagtgattttactctttattgattcaacacgaattccattaatcctttcaatcgtaatttttgcattgcttgcttatggttatggatttttgaagaagaaaaattaaaaacttggcagagactcgaaaattttgagtctcttttcttttgcatttgataatgaatagtttaagagagagctaaaaagtaatagaaaagaaggttttgtttaatagttggaggagatctaaatcccggtgtgacgcggtttaattgtatttttgttggggagggattatactgaaagtgtggaaagatagaaggccgaatttaacaaacatcttcttataataaaactactttgaagtacgttaattagactttttgcataaaaataccaacaccccactccacatgaaacgctttagtttccgtaaaaagtatgttagctaaaagtaattagtggctatatctacaacgaacctataatgataagcttaagttcctcgtattaagcagatagataagttaccaaaaattaaaaataataatactcggcctttcttcccacttcttcatggttgagaagcccggaatgttattttgataaacgtcccgggcttctgccagtttaacccctaaatattttatgttatttcctgggaaatactaaagttagtgaaactgtaaattacttctctaaatatttgaacatttgctcaattgattttaattgagtataatagagaaacttggcagaggcgacggaaagacacatagcaaagacgattcgccacgtgtaactttccgtttctttttactaacatatgataacgttttcatgagttctgaaaaaactttgtgaaattttaaaaagctgaaaagttaataaaataaatgaattgtaaaattataatttaaaaaatgataaaaattcacaaatcgtctacaaaacagcgctttacaggaaggaaatttaaagatattcttaagtagttaactcgccacaactgcaattatattatcttaatttggaacggctgttaacgaatattctatttaaggagggtacacagccatgtctatgtatcttattatcaacattattgggttgattgtctttcttggaattggatggcttttctccaagaatcgaaaggaaatcaactggaagactgtaggaatcatggtagtattgaacttacttttagcatggttcctagtaagttcagcagctggtcgtgctggggttaaagcggccgctgatggttttgcttggattgttaacgtctctgcaaaaggaactgtgtttgcattaggtgattggtatacaccaaagaaccttaacttcatttgttctgcattgatgccaatccttatgattgttccattgttcgatatcttaaactatattggtgtattaccatggattattaagtggatcggacgtggactttcattcattactggtgaacctaagtttgaatcattctttgccgtagaaatgatgttcttaggtaacaccgaagttttggctatttctggtatgcaattacgtgccatgaacaaggaacgtaatttgacgattgccatgatgtcaatgtcttgtgttactgcttcaattcttggtgcatatattgaaatgatgccaggacaatatattctgactgctgttccaattaacattattaactcattgattgctgtaagtatgttaaaccctgttaaggttccagctgaagatgacaccatcgaaaaggttggtgctgaagttgactctgataagcgtgaaccattcttcagtttcttgggagactcaattttaggtgctggtaagttaatccttatcatcattgctaacgttgttgcctttgttgctttggcagccttgatcgatgctatcttagcattattctggaaggacctttcacttgaaagtatcttaggtgttatcatgttcccattctcatggttacttggtttacctgttcaccaagcatggatgctttcccaagatatgggtatgaaattgattactaacgaattcgttgttatgggtaaagttactggtgaaatcaacagttacgcacctcacttgcgggctgtcttgactgtcttcgtaacttcatttgccaacttcggtactttaggtatgattattggtgccttcaagggattagttgacaaagaaaacaacgattacatcgcttcaaacattggttacttaatgctttctggtattttggtttcattattatcagctgcatttgttggtctctttgtttggtagaaatgaaaaagcagctgggaaggctgcttttttcaacattaaattcgaaaacgcttgcacgataaaaaggagataaaattatgactacaaagattattatggatactgatccaggtattgatgacgcagctgctttaacaatggctattaatgacccatcattagacttgaaattagttactacagttgccggtaacgttactgctgataagacgactgctaacgccttgaagattattcacttctttggtaaggatattccagttgccgcgggtgccaagcaaccattgattaagccttttgaagatgctgctcgaattcatggtgaatcgggaatgcctggttatgatttcggtgacgactatggtaagccacttgataagactgctgttgaagcgcttcatgacgcaatcatggctgaagatgaagtcattctggtgccaactggttcatacactaacattgcattactctttagcgaatacccagaagtaaagagtcatattaagcaaatcgttgcgatgggtggttcgttctccggtggtaacatgaccagtgctgccgaatttaacgtcttcaccgacccagacgctgctaaaattatgtacaatgcaggtgttccaattgtaactgttggattggatgttaccttaaaggcgctcttgactgctgatacaattgaaaaactcggtagccttaataagactggtgaaatgttgcatggattaattacgcactataatgatggtaatgatcaaggtcgtccaatgcacgatgttaatactatcttctaccttcttcatccagaagcatttactacaaaggatatgtgggttgatattcaaacggatggtccggccatcggtgctactgttggtgacattcgtgctgcttatcatgatggtaagaccaacgcaaaagtttgcttagacattgatgctgaatacttcaataagtggttcttagaagaagtaagcaaaatgaaataagatactgggagctgagagcttgctttcggctctttttattactttcttgtgtaaacgcttcacagtataataacagtagttaaagtaaggaggaaatgcaaaatgaagaatattatgattgctggcgctggtgtattaggtagtcagattgcatatcaaacggctttatctggctttaatgttagtgtatataaccaccatattgataccgctgaacgacggattaaggcgttgaaaagtgattatgaacgtgacttgcatttgactgataaggaatttcaacagggccttgataatattaaagttattaccgatgatattgcgactgcagttaaagatgctgatttaatgattgaagctttaccagaatcgttagagttaaaggaacagttttacgaagaggtttcaggattagcccctgaaaaaacaatctttgctagcaactcctctacatttatccctagccaactagctccttatactgatcggccagaaaaatttcttaatatgcactttgctaaccaaatttggaaatttaatgtggtcgaaattatgggcacctcccaaacaagtccagaggtgattgaagaagctacaaagtttgcccgggaaataaagatggttcctgttattcttaataaagaacaacacgggtatattctgaattcccttttgattccgttacttgcatctggtcttagcttatgggctaaaggagttgctgatccagcgatgattgataaggattggatgatttcgacaggtgcaccaatgggaccatttggcattttagatatggttggtttacggacggcagcgcaaattgaacggaatgcctatgcccagactaaggatgaaagtcataaggaaattgccgataagatggaacagatgattcaagaagggcacgaaggaaaagaatcgggacaaggattttacaattatcccaatccagctttcatggatccagattttctgaagcattaagattataagtattgaaaacttagaaaagggagcaagataaaagtcactcgtgactgctatcttactcccttattttgcgctccaattttcacgtaatccggttgcaacaatggcaaaattacggtacagtagtagaagacgtgaaacaaaaaatgtttcacgaaaggagacctaataaatgaatcctgaacaatttcaacaagcattagctgatcatggtatcaccttatcagcagaacaaatgcaacaatttgctgactattatcaattattagttgaaactaatgaacatgtaaatttgacacgaattactgaaaaggatgaagtgtatttaaagcatttttatgactcaattacaggagcgtttgctgaaccacgcttagagagtgaagaactgacattatgtgatatcggtgctggtgccggctttccttccttaccgttgaagatcgcttttccgcaattaaaggtaacaattgttgattcgttaaataagcggattgcttttcttgaagccttagttgccaaactcggtttaaccgatgttactttgattcatgatcgagcagagacttttagtgccaagaacagtccatatcgggagaaattcgatattgttactgcccgtgcagttgcccgcctatcagttttaagcgaattatgcttgcctgccgctaaaattagcggggaattcattgcttataaggcaagtgcagctccggaagaacttcaacaaggtggggcagcaattaaacagcttggtggaaaagttcaaaaaacggtgacattgactttactggaaactgatgaagaacgtaatattattgtgattgataagataaaggcgacccctaataaatacccacgtcgtccaggattaccaagcaaaaaaccaattcaataagataaggagttgaaagtatggctttttcattatttggcattggaaaaaataattccgataatacaaaaaataaggtcgtagaagtaaaaattgatcaaattattcctaatcgttaccagccacggaaagtatttgatcaagacggtatccgtgaattagcacaaacaattgacgaacatgggttgttacaaccaattgttttacgtgaatacgaaccagcaaaatatgagattattgctggggaacgtcgataccgggcgatgaagctcttgaagtgggaaaaagcgccagcaataattgaaaagatgagtgatcaagagacggcttcacttgccctcattgaaaatctgcaacggtcgcaattgagtccagtcgaagaagcgcaggcctaccgacaattaatggatctgaaccatcttacccaatcgcaattagcaaagggaatggggaagagtcagtcctttgttgctaacaaattacggttgctgcgtctgatcaccccagtccaaacagctattttagatcaccggattacggaacgtcatggtcgagcattattagatttagatgaaaaacaacaacgtgatatgttaatgcggattgttaatgaacggttaacagttcggcagacagaagatgaagttgctcgcttattagggcgtccgttaccttcagaaattgcagaattaaaagcagccgctaagcgcaaagaattagcttctattgaggatcatgctgaagaaacagcagacgttgaagaggtaccagtagaaaagcctgcagaaaagaggcgctctcctaaacgaaagacagctaagaaggcccgaagcaaaaaaactcagcaggctaatgatgcgcgtttagctttaaatacgattaaaaagtcaattaagctggcgacaaatgaaggctttgaaattaaaatgcatgagaaggaaaacggcgatacttatcaattaacaattgagattccgaagaaacagtagggaggccaaaaaatgggttctgtaattgcccttgcaaatcaaaaaggcggtgttggtaaaacaacaacgagtgttaatttgggtgcatgcttagctgagactggccagcgcgtcttattaattgatcttgatcctcaaggaaatgcaacgagtggtttgggcgttgaaaaacagaatattaagcaaagtatttatgatgttttaattaatgaagtgccattagaggatgttattcaaaagacaagtcacgagggagttgacattgctccaacgacgattgccttatctggagctgaagtagaattaactaatttaatggcccgagaaacacggcttaaggattcttttggggaaattcgtcaaaaatatgattttattttaatcgattgtccaccatccctggggctcctgacgattaatgcatttactgcttgtgactcaattctgattcctgtccaaagtgaatactatgcattggaaggtttaagtcagcttttaaataccatcaagcttgttcgtaaacacttcaatccgcaacttaagattgaaggggttcttttgacaatgtttgaccggcgcacaaatcttggacaacaggtaaattctgaggtcaaaaagttttttggtgaccaggtttatgatacgattatccctcgtaatgtccgtttatcagaggcaccaagtcacggcttagcaattattgattatgataaaaattcaacgggggcacacgtctaccaacaattagcaaaggaagtgttggctaaccatggcaaagaataaaaaaggtgggcttggtcgaggtattgaggccctctttgcggaaaatgaagtaactgagcttacggatgaaacggttcaagatatcaagttatcgttaattcatcctaatccctatcaaccacggcgaacgtttgataaagaggcgttggcagagttagcttcatcgattgaaaaatcaggggtgtttcaaccaattattctgcggcaaacggatccaaaaattaaccgttatgagctaatcgctggggagcgacggtttagagcttctaagatcgccaaacagaaaactatcccagcaattgtgcgtaagatgagcgatgaccagatgatggaaatcgcggttctcgaaaatcttcaacgtgaagaccttacaccacttgaagaagcgcaagcctatcagatgttaatggataaattatcattaacgcaggcacaggtggcaagcagattaggaaagagtcggccttatattgccaattacttgcgattactagggttaccaaaaatgatcaaagagtttcttaatactggcaaactatcgatgggtcaagcacggacaattctcggtttaaaagataagacaaaacttgttccgcttgcccaacgagctgtcgaacaaaatcttacagtgcgacaattggaagagattgtaacgcagactaatggaacggccaaaaagaaagaagaacggcggacacaacgaaaaccaatctatattcgagaagctgaatcacagttgcagagtaaatttggtacaaaagttgctgtcgcgcaaagtcggaaaaaaggcgcaggaaagatcgaaataccttatacgtcaaatgaagactttactcgaattcttgaattattaaatataaccttagattaaggaggaataactcatgacagcatatgataaaggtgacattgtaatgatgaaaaaggctcacccgtgtggaactaaccgctggaagattacacgagtgggtgcagatattaaaattgaatgccaaggatgtggtcatattgtcatgatgacccgtcaaaaatttgataagggattaaaaaaggttatcgaaaaagcggatcaagatgattaatatttttaatgattgatgatcacaaataactaattgtagattaaaataataaatgattaattgaaaaggaaagtgaacaatttatgtcattaactgcaggaatcgttggcttgccaaacgttggtaagtcaacactttttaacgcaattactaaagctggtgccgaaatggctaactacccattcgcaacaatcgatcccaatgtggggatggttgaagttccagatagtcgccttgaccggatccaggaattaattccagcgaagaagatcgtcccaactacctttgaatttaccgatattgccggaattgttaagggtgctagtaaaggtgaaggactaggaaacaagttcttggaaaatattcggcaaactgatgcaattgttcatgttgtgcgggcatttgatgataatgatattactagtgtttctggtaaagtggatccaattgaagatatcgatactatcaacttggaattagtaatggctgacttagatgctgttaataagcgcttggcaaaagtacagcgggctgctaagggtcgtgataaggatgctttagcggaattagaagtactcaataagattaagccagttcttgaagatggcaagggtgttcgctcaattgactttagcgatgatgaacaaaagattgtcaaagggcttttcttgttaacaagtaagccagtcttatacgttgctaacattgctgaagaagatatggcagatccagatagcaacaaatacatggatgcaattaaagaacacgtaaaagatgacggagaagttattggcgttgcagcagctgctgaagaacaaattgccgaaatggatgaagcagataaagcggatttccttgaaatggaaggcgttactgaaccagggttgaaccggttgattcgggcagcctacaagctcttgggtcttgaaacattctttactgctggtggtcctgaaacgcgggcctggacttataagaagggcacaaaggctccacaagcagcaggaattattcactctgatttcgaacgaggatttattcgagcagaagtaatgagctttgaagatcttgatgaattaggttctgaatcagcagtaaaggaagcggggaagctccgtcttgaaggaaaagattatgtaatgcaagatggtgatattgttgaattccggttcaacgtttaaacctctgaagctaagagaggagtagttttatagtgagtgaagaacaaccacggaatgcacaagctggtcaacgtcaaaaacaattagaaaaagaacggcggcaagcgaatgggaatgcctttagcaactatgatctaacacgaaaaaatgaagattttatgtatcaattaaataaacagttggatcgtctcggtgttccttcagataagaaagactcgatgctaaaggaaaccattgataaattgctagcaggacaaaagaaggggcaaactgcgcgggcattatttggtacgccaactgaatatgctaaagaattgaagaacccaaagccaactcctgctgaagcaagtaagcaatcaattaagttgttagcaattgataatatgctgattttcttgagtatctttacttttatgtttggcttaatgttctggttatcaccagctgcaatgcaaacaaagaatgctggaagcagtggtattactgcaatcttaatcgtggcgatcactggaggattgatttttggttatgtggctacccaagttcaaccgcaaattgataagaacggtaagcgggtaagtaagaagccattatggcaacgaatccttttgatagttgctggattagcagcttggttgattatttacatgcttgtaagtatgttgccaaatgtaatcaacccacggcttaatccatggatctacattggcgttggggttattacgttcattggggatatgtacttcaggtccaaatttcatgttacaggttccctttacggtaatcgtgcgccacgacgttaaccagcaaataattttagtaacggaactatttgccaggttatcttattaaaataaataagggtgagaaaaaggtgaaaattttttctcgcccttttattttgctcttttttgaaataaatttctgaaaatctatggacaaatgttcaacggattgttaagatatatacgtaaacttatgaaaacgcattcaaaattgagaggagatcatattattatgaagttaacgcaagcgcaattagcaaaatacatggatcacacaatgcttaaaccagaagctacccccgaaatgattgataagacagttgaagaagctcgtaaatacaatacagcttcagtttgtatcaatccttactgggttaagcgagttcatgaaggattagaaggtactgatattaacacttgtacagttatcggcttccctctcggtgcaacttcaacagaaagcaaagtttttgaaactaagcaggcaattgaagatggcgccgatgaaattgatatggttatcaatatcggtgaattaaaagcaggaaatgatgatgcggttgttgctgatatcaaagcggttgctgatgctactcacgaaaagggtaaacttcttaaagttattattgagaatgctcttcttactgacgaagaaaaagcacgtgcaagtaaacttactgtaaaaggtgatgctgactttgttaagacttcaactggtttttcaacttcaggagcgaaggtagacgacgttaagattatgcgtgaagcagttggaccagactttaagattaaggcagctggcggaattcacagccttcaagaagcttacgatatgattgaagctggtgctaaccgtttaggtgtttccgcttctgttcaaatcttagaagaagccgcaaaacaataagaataaagtttaattactaatcttaatttacagaaataggaggagtcagaaaatgtcatataaacgtgtttttgttattgtaatggactcagttggtacaggtgccgctcatgacgccgcaaagtttgatgatgttggatcagatactcttggccacgttggtgagtattacaaaggtgccttgaagttaccaaaccttggtaaattagggattagtaatttacgtgatactccgattgaaggtgttctagttgctgatccagctattggtgattacggtaagatggaagaaatttctgccggaaaagatagtatggatggtcactgggaaatgatgggtttaccagtaatgaagccattgtcaacgttccctaatggttttccacaagaaattgttgataagcttgaaaaattctcaggacgaaaggttattgttaacaagccatactcagggacagaagtaattcatgactatggtgaacgtcaaatggagaccggagaattaattctctacacgtctggtgattcagtaatgcagattgctgctcatgaagatgttattcctgttgaggaactctacaagatttgtgaatatgcccggacacttgttaatggtccagaatatactgttggtcggattattgcccgtccatatgttggtcccgataaagatcactttacccggactgctaatcgacatgactttagtttgaagccaattggtgagactgatatggatcgtcttcgtgcagcagggtacgatgtaattagtgttggtaagattaatgatatcttctctggtgaagggatcgataaaggataccataacgaaagtaacatggacggaatggatcatgttgatgaagtaatgaagcaagactttaccggtttctgctttacaaacttggttgattttgatgcaatgtacggtcaccgtcgtaatccaaagggctttggtcaagcattaatggactttgataagcgtctgggcaaagttcttgatgaaatgaagccagatgatcttttaatggtaactgctgatcacggtaatgaccctggctttaagggaactgatcatactcgtgaaaatgttccattgctggtttactctccttcaatgaacaagccaaatcaatcccttgggttgcggaagacattctcagaccttggtgcaactatcttagagaactttaacgttgaaccagtaaaaggtaccagcttctacaaggaaattagtaacgattaagattaattaaggaaaggggcgaaacacgatgcgaatggttgatatcattgacaccaaaagaaatggcggagtcctaagcgatgagcaattacaattctttgttgatggcgtcgttaatggaacgattcctgactatcaaatcagtgctctccttatggcaatctatttccaggatatgaccaaagaagaacagacgagcctaacaatgaagatgatggagtctggtgaacgattagacttgagccgaatccctggaattaaggttgataaacattcaacaggtggtgttggtgataaagtgagtttgccacttgcagcaatggtcgccgctacaggaattccggttccgatgatttcaggtcgtggtcttggtcatacaggaggcacgcttgacaagttagaagcaattccgggatttcgagtagaactttctgaagatgaattcattaatcaagttgctaaagaaaaattagcaattgtaggtgcgactggtgaggttgcgccagcagataagaaaatttatggattgcgggacgttactgatactgttgactcgattcctttaattgctagttcaattatgagtaagaagattgcttctggaacagatgcgcttgtaattgatgttaaaactggtactggtgcctttatgaagacgcttgatcaatcaagactactagccaaagcgttagttgagattggtaaacaagcaggattaaagtgtatggcagtaatctcagatatgaatcagccgcttgggaataaaattggtaatgcccttgaaattgaagaatcaattgatgtcttaaaaggaaagggaccaaaagatcttactgaattagtcttggcgcttggtagttatatggttgtaatgggtgaaaaagtacaaaatactactgaggcacgaaagatgttagagcaaactattcaggagggatcagccctggaaaggtttgcggcaatgatagaagcacaaggtggagatcctgctgttgttgataactaccaattaatgccgcaagctaaatacaagattcctttcaaggctgatcgggatggcgtattgacaaaactttcagcagatgaagttggaactgctagcatgttattaggtggaggtcgtcaaaaggcagatgacacccttgactatagtgtaggaatcgaattgcaccataaactaggtgaccatgttaaagatggcgaaccaattttaactatctatagtaaccgccaagaaattccagacgtagaacagttattaaaagaaagtattaaaattagcgatgatggcaaagtaccgacgctaattcatgaaattattgaataaaaagacaggaggatatttcaatgagtacacatattaatgcaaaaatgggtgattacgcagacactgtattacttccaggggatccgctacgtgcaaaatatattgcagaaaacttcctggaaaatgttaaacaagtaaattcagtccggaatgcctttggttatactggtgaatataagggtcaccgtatttcagtacaaggatctgggatgggaattccttcgatgtcaatttatattaatgagttagtacgcgaatttggtgttaaaaccattatccgggttggttcttgtggcggaattgctccagatgttcatgttcgcgatgttcttcttgcccaagggtcttcaactgattcagcggtaacggtaaatacatttggatcaggattccattacgcaccattagctgatttcaagttgttagatactgcctatcatgtagctggtaaattaggtattgaaacaaaagttggggatatctttgctgccgatcgtttctacaatgatgagcttgatatggaaaagcttcgtgactatggaattttaggaacagaaatggaatctgccggactttacttgttagcggctaagcttcatttccgggcactttcagttttgactgttagtgacttaatctttggtgacgaaaaagcaaccgctgaagaacgtgaacgaacattcaatgatatgattaatatttcgcttgaaacggcaattgctggaaagtaacttcttgcataagctagagagtgcattttataataaaatgtggtttagataatgaaagtgagtgggaattaaccttctcgacaaggcggtgggctaaggatagaatggtgattagcacggcacgggttgattatcgttcgaacttagcctctagccttgtggttaatttccacgatatcgtaacaatattagtataaaaaacgaggctgttgaaaaaacaaaagttttttctcagcctctttaatatggggaaaggagggaaattagatgaatgataaagataagattgaattagcgctaaaagtagcaaccttatattatcgtgatggatggaaccaaagcgatattgcaactgaactaaatatttcccgggcaacagtgtcacgattattacaatttggtcgggatcgaggattagtaaccattaaaattcataatccggttgctccgcttcaccagttggaagtagacttactcgctaaatatccatcattgcataaaattattattgttccaggcacggatgatccacttgaagaagttggcgcagcgggtgctaaatatatcgaacaagtcgtagaagataaagacattattggcttaggctggggaaaaaccgtctatcaagtaggattgcatttaaaacctaaagacgttactgatattactgttgttcaaatgaaaggcagtatggcaaatactaatacgcgaaattatgcgtttgaaacggttaatatctttgccaatgcttttaataccgttccacagtatttgccgttaccagttatctttgatcatgcaaagacacgtgaattagttgctaatgatacccacatcaaacatattttgaaattaggggagcagtctaatatcgctgttttcacagtggggacagtacgtgactcagcattgttatttaaattaggttatttcaccaagcaggagcaattaacgttgcaacatgaggcggtaggggatgttttctctcgtttcattgatagcaagggccagatagtaaatgaagatattaatcaacgaacaattgggattgcgctcccagagttgcgaaagaaaaaacacagtattttagtagcagcaaatgttgctaaggtaccagcagtgcatggtgttttaactgctggttatgcaaatacattggttattgatcaggagagtgcgaatagcctagttaattttttaaattaatttaaatatttagattgacctcagtgcgaaatcctagtagagtatacctaattaaaaatcaaaggagttgcactacagatgtcaaattgggacacgaaatttgccaagaagggcttaaccttcgatgatgtattacttattccagctgaaagtcatgtattaccaaatgaagttgacttgagtacacagttagctgataatttgaagcttcatattccgttgattagtgccggaatggatactgttactgaaggaccaatggcgattgcaatggccttacaaggtggcttaggggttgttcacaaaaacatgtcaatccaagcccaagcaggagaagtagctaatgtaaagagcgtagtcgtacctgcaggagcaactaaggctgcagttgatgagaataatcgtttattagttgctgcagcagttggggttactagtgatacttttgaacgtgctgaagcccttttgaaggcgggtgcagatgctatcgttattgatacagctcatggacattcagcaggtgttcttcgtaagatcgcagaaattcgcgaacacttcccagacgcaactttaattgccggtaatgttgctactggtgaagctactcgcgctttgtttgatgctggtgttgatgttgtaaaagttggtatcggtcctggttcaatttgtactactcgggtggtcgctggagttggtgttccgcaaattactgctatttatgacgctgctagtgttgctcgtgaatataacaagccaattattgctgatggaggtattaagtactctggtgacgttgtaaaagctcttgctgctggtggtaatgcagtaatgcttggtagtatgctttctggtactacggaagcacctggcgaagtttttgaagacaatggcaagaagtacaaggcttatcgtggaatgggttctgttggtgcaatggctcaagcacatggttcctccgaccgttacttccaaggtggggtaaatgaagctaataagcttgttccggaaggtattgaagctcgggtagaatacaagggcgatgtttctgatattgttttccaaattgatggtggccttcgttcaggaatgggttatgttggtgctggtgatattccaacattgatcgaaaaagcccaatttgtccaaattactaatgcaggacttattgagtcacatcctcatgatgtccaaattactcgtagtgcacctaactataaataattaatttaataaggaactgctatggctttattcatgaagatatagtcacagcagtttttatttcccgagaaataatggagggtaaactttttgttaaggctatcctagaatgatcgcttttttcgcatagttagttataatattcaataggatattatgctgcaaaaaggagtacctcttatgaaaattctagttgttgatgatgataaagaaattgttcaattacttgaaatttacatccgaaatgaaggatatgagccaatttctgcttacgacggaaaagaagcgttgacaaagctaaatactaatcctgatatcggtctgattattcttgacttaatgatgccagaaatcgatggaatggatgtaattaagcgggtgcggaaagattctgatattccaattttagtgctttcagctaagacggcagatatggataagatacaaggtttaatcactggtgcggacgattatgttactaagccatttaatccgcttgaagtaatggcacgagttaaatcattacttcgtcggagccaaggagaagtgacaaatgatcaaccagatattcttaatgttggtccattattaatcaataaagattctcacgaggttaagacgattaaaggggatgtaattcaattaacagcccttgaatttggtatcttatacttactcgccagtcaccctaatcgtgttttctcagcagatgacatttttgagcgggtatggcaacaagaaagtgtcgtatcagccaaaacagtcatggttcacgtgagtcatttgcgggataaaattgaagaagcaactaacggtgaaaaggttattcaaactgtttggggtgttggttataaggtggaagaccactaaagcctagccttaaggatgtggaggaaaaattgtgaagttaacggggcgtgaaaagagttcgcttattttagaaggggtagtaacggttatcttattgttattgctgaatatggcgattatcgtaattattcaagatgccattcagtcaaatccgggagtaaccaatggaatctttatgattaagcaatcattgaagattggtcctcttcaagcacaaatatggagctatcagcggatcttaattgcctttttagtaattattgatgtgtgggtggtatggtggcgattgcgtcgccggtaccacctttatcagatggatcatattatcgcggaattacactatattgcgcagggacatttggatcatcggattccgtttcggctaaaagggaatcaacagcatgttattactagtgtaaatgcattagttgatagtgcggtgcgttcaatggatgatgaacggaagattgaaaagtcaaaagatgaactgattactaatgtgagccatgatttacggacgccattgactagtattattggctacttgggattgattgaagataagcagtatcgtagtgaggaagatattctaaaatacacccatactgcttatgagaaagctaagcaaatgaagaccttggtggatgatttgtttgaatatacaaaagttcagcaacatggggcaccggtaaatattatgaaaatcgatcttaaccagttaattgaacagttaacggcaagttttgaattagaagcccagcaccgcggaatcgaaattacttcctcagttatccctaatcctttaatgattgaggcggatccggagaagcttggtcgagtttttaataatttagtttcaaatgcctttaaatatggcaatggtgcaagttacattcggatcgatgcccggcaagaaaatgatatggtggtcgtcaaagttgctaatgatggtacaccaattcctgaaaaagcacttgaccacctatttgagcgtttctaccgcgcagaagcttcccgttcacgagctactggtggaacgggattaggtttagcgattgtcaaaagcattgttgatcttcatcatgggagcgtcaaggttacttcaaatgaagacgaaacagcatttattgttacattacctttaaaacaagaagttaaagaaaccaaccaaaaatgagaaaaaagtctaaaatcaaatgattttagacttttttctttttcaattatattcaactaattttatatgtggtagactaaaagagcattgtgtcacttgatattataaaagatacaaattattggaggaaattctgtggctaaagcacaaataaatccagaaaggacacgctggcttgaggtgcttggtgtctcaatgccattatgtcttagttatattccgattggattggcctgtggaatcttactacacgcagcaggtttaaactttataatgattttattggtgtcggtattagtgttctctggtggggcacaatttattctggcatcgttattagcaagtaacgctccattagggactatctttatctcacttttcttcttagagttacgatatgcattgttaggatcgagtttatctaaatatattaaggataaatcagcacgtttcatcctcatcttttctgcatcaatgaacgatgaaaattatgctgttaactatatgaagtttgcaactgataagaaatgggatcccgatgacgcgttgttagtggagtattattcacttgcagcatggtcgacttcaaacatggttggtggtttgatcggtggtgcaatttcgattgaccttgaagtggttgattttgcattaacggccttatttttatatatgatcgtaatgcaggttcaaaaccacttgaccctagttattggcatcttggcagctgttcttggtgcatacttccaggcattgactaaaagtacacttgggattattattgcaaccttaattgcttcctttgttggattcttgattgaaaatacagttcgtcaccatagtaagcatccaaactcgaactggttcttgacaaaaatgtttaggccgaagatcacaaagactacgatcgaggataaacaagctcaacaaaaagaagttaaggaagttgaaaaactggaaactaagattgaagatgttgttgaacaccatgatgagaaacatgaagagaaaaaacatgatgatcaacatcctgatgagggctagacatggaacaactattaagtaataaaatcgtttaccatattatagtgattatcttggcagctttagcggcatttattccccgttatctaccagtattattcttctcaacgcgaaaaatcccagaatggtttaatgaatggatgaaatatgtcccagttagtttatttgcgaccctggttgtaaaagggatcttcttaactggttcttatcattttactctattcggttatccagaacggattattgcagcattgatcgtgattgtgattgcgtactttactcgatcaatgtcgatttcagtaattgctggattggttgctgtttggcttctgagtttagcgttataagagtagttttgttataattataaacagtggattggtttctagcttgcgaagaagccaatcccttttattttaggaagtgagtacgttggattttaagcaaacaattgcatttgttaatcttgctaatactttggattatcaatatgcagcaaaaaaatcagggataacggttgatgaattggttcacacaattaaggcgcttgaagaagagcttaacatcaagcttattagacctgaaggcggcgtagttgaattaactgaaatcggggcgttttaccgttgatcactgagattgctcaaaaacatgctaaattattatcggtagttacggattatcgaaaaaaggaagcggaagaagcgatcaaagttactgtcgtcccaggctttgccaattatcaagcagccccggttgttaaaaaattagcccagcaacataaaatgaatcttgttgaagatgttgatccaatggcacagctacaacaaggggaaagcgagctggcatttattagttatgccggcaaacttcccgatgattttgaggtgctttcagtgggaactgatgacttagtagcttatatcccagcgcggaacccactttctaaacaaaaggaattaacgcttactgatctaaaagcagaaaaatttttaacactaaaccatcaaaatccatttgcagtctttgttcaacaggtttgtgctgcggctgggtttgaactatattctgtttttgaaggagaaaaaggaagaacattagtaaatatggttgctttagggatggggataaccttgttgatggaacaatcaataagtgaaaacttagatagtaaagtggttaaagtgccgattgttcccaaagttactcaaaaccttgcatttgttcgtcgtaaaaatgtagaatacacggcagagcaagaagagttatggcaagctctaaaagaatcctttgaaaaatagaaaaaaggtttgacaatttcgcaaactacgcttattatcataaataacaaaaatacctttaacttagtcccgtgaggctaggaaggatttaattgagcgtttaagtacaccttcttagctattgctgagaaggtttttcttttaagcagtagcaccaagaatacgccagtaaaatcaataggtattttgaaacaaccgaccatttaattgtttccagagagagcagaacggtatgttgtttttagcctacttatatcctaaaagcaaacagtgatgcctctcgaaatttaaatgggaagttatcactgttttgttgtaattagactggaaaaggagcgctattgatgattagtacagaaagaattcaaccaaatttagtaacagttgccgacatggatgcagcagatgcaattgatttaattcatgaagcccaagcatataaagctggaaagcaagcggttctcactgcaccggcatacgcggttaacctcttctttgaaaactcaacccgaacaaagactagtttccaaatggcacaaatgaagttggggatgaatgtactagaattcgaagcgggcacgagttcagtgaaaaaaggggaaagcctctatgacactgttaagacaatggaatcaatcggtgtaaatgttgcggtaatccgtcatcctgaaaatgaatattacaaccaattgattaatcattcagaccttaagatcggaattgtaaatggtggtgatggtagcggccaacatccatcgcaatgtttacttgatatgatgacaattaatgaagaatttggcgatttcaaggggttaaaagtactaattattggtgaccttagtcactctcgagtagcgcactcaaatgcaatgatgcttaatcgtctaggagcagaggtttattttgctggcccagaaaaatggtatgatcctacgctggaacaatatggaacttttggtgactttgacgaattgcttcctcaaatggatgtagttaatttactacgagttcaaaatgaacggctaacgactgctgacggtcaagcttttgacgctaatcaatatcaccaagcttatggtttaactttagagcgagccgcaaagatgaaacagggggcaatcattatgcatccggcacctgttaaccggggtgttgaaatcgatagctctcttgtagaagcgcctaattcccgcattttccaacaaatgacaaacggcgtatatacccggatggcaattcttagtcgagttcttcgttaccaaggattgatgtaaaaaggtgattacgatgagtaaggcagttttactaacgaatggccgacgagtttataatgatgaattggttaagactgaagttttgattgtagatagcaagattaaggcaattggcgagcatatccaggcaccaagtgatgcagaaaaagtcgacctggataatggcttgattacaccaggactaattgatgttcatgtccatcttcgcgaaccaggctataccaataaagaaacgattgctacaggaagtaaagccgctgcacatggtggctttacgacaattgctgcaatggccaaccttaatccgacatgtgacacaccagaaaaatttaaagaacaggttgatcggaacgagaaagctggactggtaaaaatcctccaatattcaccagttacagttggtcgggctggaaaacaagcagttaatgttgctgagcagtatgctgcaggtgcccgtctttttagcgatgatggtgcgggaattcaagatgctggagttgtataccaagcaatgcaacaactagcgaaagttaacgctccgttatgtgatcatgcgcaagataatcaacttgcacaaaatggggtaattaatgatggggcaactattgctaaaaaactagcactaccaggaatgccagcgattagtgaaacagcgcaaattgctcggaatttggtgattgctcaggcaactggggtccattatcatgtttgccatgtttcaactaaagaaagtattgacctgattcgtcatgccaaacaacaaggaattaacgttacatgtgaagtgactccccatcatttacttttagccgatgctgatattaaagaggatgatgctgaatttaagatgaatccacctcttcggcagcgtcttgaccaacaggcttgcttaattgggctattggatggcacgattgattgtattgctactgatcatgcgccacataccgatgcggagaagcagcaaggatttcttaaatcaccaaatggtattgttggctcagaaacagcttttgccttactctatacacactttgttaaaacgggtatctttacgcttgcccaattgattgactggatggccgttaagccgcaagcgatttttaaccttgataacgctggattattaaaggtaggggacccagcagatattgctgtatttgatatcgatcatcaagatgtaattcaaccagaccagtttttctctaagggtcacaatactccatttgttggtaaacaagtatacggaatgactaagcgaacttatgtcgatggaaaactcgtatatctggagggagaaggataatgcaagaaacacaacgattagcagttgaattgccgggattatcactaaaaaatccgattattgcggcaagtgggacttgtggatatgggcaagaagcagctaaaaagtataatcttaatcatttaggctcccttgtgttaaagtccactaccctccatccccgccaaggtaatccacgtccgcgagtttgtgaaaccagtgccggttggcttaatgctaatggtcttcagaatgtgggcattaccgcagcaactaatgaaaaaattccgtggttacgaaaaaattatccgcaactaccgattattgcaagtgctgctggtttttctgaagacgaatacgttaaagttgttagtgaatttgctaatacggctggggtgaaagcaattgaattaaacgtatcatgtccgaatgtaaaacacggcgggatggcaatgggaactgatccagaagtgcttcaacgattagtaaaacaagtagttaaagttgccctaggaattcccatctatgtaaagctaacaccaaatgtaactaatattgttcccctcgcgcaagcagctgagcaagggggcgctaatggcctgacgatgattaatacgttaacgggattaagcatcgacttaaaaactcggcgcccggctttagctaatgtaacgggcggtttatcaggtcctgccattaaacctttagcattaagaatgattcaccaggtccgccaggtttcttctttaccgatcatcggcgtgggtggaattgaatcagctgaagatgttcttgaatttatgatggcgggtgctaatgctgttcaaatcggggcagctagttttcatgatccattggtttgcccgaaaattgcagctgatttaccaatcgtaatggatagatacgggattaagaaacttacggatttatgggaggtaagattttgaaacgcttcgtaccgatggtggctatcgatgttgcaactaagcaggaagcaattgacctatttgataaattaatggtaaaaccgcagccgatcgtaaaaattggaatggaattatattatggcctgggacaagtaattgttaaagaggcgaaaaagcggggatttaaggtattccttgatttgaaattatacgatattccgaatactgttcatcgcgcaatggcagctattggccgattgggaattgattttacgacaattcacgcagctggaggtagtgaaatgctgattgccggattagccggtctagaagaaggagctaaggaagcaggcgttgaaccagcaaagttattagcaattacccaacttacttcgattgatgaaaaaattctccatgaacaacagcatgttgatttgtcgttgattgagtcagtccaaagttacgcgcgcttagcagaaaaagtaggattggccggcgtagtatgctcagcccatgaaatcaaggcaattcgtgaagtgacgggggatgatttcctatgtgtaacgccaggaatccgcccaactcatgcaataaaagatgatcaaaagcgagtggttacaccagcacaagcaagaatagatgggagcaatgcgatcgtagtgggacgaccaatcacccagagctttgacccagttgctgcttatcaagaagtccaaaaagcattcttaaatgaggaggaagaaaaatgacatattcacaacgcgttgcaaaagcattattagatattcatgctgttacccttagcccagaccaaccatttacctgggcaagcggtctaaaatctccaatctataccgataatcgattgacgatttcttatccagaagttcggcaagcaatttttaatgggatggttgaacaaattaaacttcattttagtgaggccgatgttattgccggaacagcaactgctggaattcctcatgcggcatgggttgcccagaatatggaattaccgatgatttatgttcggactaagccgaaagatcatggtcaaggcaagcaaattgaaggggtgcttaaagaaggacaaaaagtcgtcgtgattgatgaccttatttcaactggtggtagtgtattaaacgctgtgcgggcggttaacaatgcaggcggaaaagtaattggcgttgtttctgtctttacttatgatttgccagctgctgaacaaaactttatggcaaatggactaaaatactattcagtaacggattatatgactttgattaaggtcgcaaaggaaaatgaccaaattagtgcggaccacctcaagtctcttcaagaatggcggaaagacccgttaagctggagtaaagagcaagcatcataataattaattatcaaaaaagcctaagattgattcagaaaaaagttaatctgaattaatcttaggctttatcttattgtttatcttcccaaatcttttggagcattgggtagcgtaagtcaccaacttgtactacttgataatctgcatttgctaatgttgtagcatcaccaacgccaattgcaattgcatttatatggtgaatattttcaatatcatgagctgtcgttccaactccaatgcaattagctccgataagatttaattgattaacagcagttagatatgggctttctttatcattagtcctaacgatactatcgacataattatcaaggccaatttgtttaaggacattttgtacatctccattagcatctaacacggcaattttaacgtaatgatcatagagatttagtaaaagacgcttaatccctggaagttgatccttttcacttaggctatccgcttcttcgttaaggaatttttgccattctgcaatcattgaagccttttcgcttggggcaggattagcattaaaatgtgctaagactagggagagcccttgcgaaggagtaaggttatcgaattgggaagctaattttccaggtaatcccatcccaaattcatacattacaaaacgttgccatgcagtaaaggataacttatttgtattaacaaagatattattaaacgaaaaaatcgcaccatccatgattaaacatcccttcatagataattatgtctatattttaacgtaatcgaaaatgaaagggaatacattaattaagcatttactttagcgaggttagcggcataatcgattccctttacatctaaatactcaataatttgattgattgtaataaatggtacatgaactcggttagcaaggactgacagactatcacgacgagccatcgtgccgtcacgctttaacacttcgataataacagcaactggtgcctttcctgctaaataggcaagatcaatagctgcttcggtgtgaccgattcgatctcttaatccatgaggttgggcgtaaagaggttgaatgtggccgggatgattaaagtcagatgcttgggcagttggcttggcaatttgccgaatcgttgctgcgcggtcaaaagcggaaacaccagtagtaacaccggttgcttctaaggtaccatcagtagtaaccataaatggtgtttggtgtgggtcagtgctatgctctaccatgggcttaaacgctaaatgcttagcaatatcttcgcttactggcacacacatcaaaccatttgcctcgttcaacatttcatagatagtatcagcgttgacattttcacctaaagctactaaatcaccttcgttttcacgatcttcattatcggctaagataatataaccaccatttactaattggtttaatgcttcttcaacagttgaaaattgactttgcataatttatatactcctttgaaattctgaaagtgatagaacagttacattcgaatgtgttattataataacgaacgttttaatttaaatcaacctatttttaaactaaaacacgaataatattaaaagatttcaaagggtaagtttgctaaagagctggagaaaataaagatttctcaccagctctacgctctatctttagagtaacaaaaaagtccagaacgagatatttttcgtcctgaactaatcttaggttgttctattttgtcatgtaatcacgagtcattggtaagtttttacctgaaggacccttagttatcaagtattgaataacatcaatatttccagattcaaatgatgcagcacatgtttgaagatataaatcccacatccgtgtaaaacgttcacccatcatatcaaggatttgagcacgatgttcattaaagttcatgtcccaaatttcgagggtgcgttgatagtgacggcgaagcatttcgatatcagcgatttgcatatgattttcttcaatgtgaccgatcatttcttcgagaccaggtacataaccgccagggaagatatacttgttaatccacccattatatgcaccgccttgttgacgagtgataccatgaatcaaggcaacaccatcatcagcaaggcaaccttggatatctttaaagtaaaaacctagattttcttttccaacgtgttcaaacataccaacggatgtaatataatcccacttttggtcaccaagttcacggtaatcaacaagtttaacttcggcaacgtcttgcaaaccttctttttcaatccgttccttaacaaagcgatattgttcttcgcttaaagtaaccccagtaacttttaagccatattcttttgcagcagttaacattaatgttccccaaccacatccaatatcaagcaatgttttgccaggctttggatcaagcttctttaagatgtgatgaaccttatcaacttgtgcttttgtaagctcatcatggttgccatcagtaaaataagcacatgagtaagttagcgtatcatcaagccataacttgtagaagtcgttcccaacatcataatgactttggacatcattttcgctctctttttctgagtggccttgtttaggcaaaaatttgcggaacttagaactccgcataaaactatcggcactttcatatgctgattcgatcaatttttgaatgctaccctggatctcgattttcttatccatgtaggcttccccaagtgcaattgaggcgttcttggtaatatcacgcattggaattttctcattaaaggtgatagttacctcaggagttccgtcaccatagataacacttgatccatcccaaaatacgatctttacgggaatgttaaatgagtgctttagtagtgacttgtagaacgtcttttctaacatgaaacgcatccttctttctgcaataataatattcattataacacccttaaaataaaagtgtttcaagacaattaatgaaaacatttcataagaaagcgataaactaattgctgaaaaaatgaaagcttgctactatgctaattagtaggaaaaatagggagatgattgaatgacgaatgcctggaagcattttattgagaatgtaaaactacggcgtttcactgtcttattattaatcattgtcgtactctggctaatgaaatcaatgatgaatttaattttatttacatttattcttacttatcttgttgttagttgggtaagactcgtccagcgatggttaccacgaatgtcgacaagtttaattgtaatcgttacctatgtattgttaattgttctcttatacttaggggtgacccgctatttaccggttttatctcggcaagttgttaaaatggtcaattcagtagttcatttctatagtactcatcaagcgacgatgatatatcgttatgtcagccattacataagtaccgccactattatgagtcaggttcggcatgggataacaatcgcggttagtactttgacaagtattggtgcaattaccgtttcatttgtaatgtctttaatcttgagctttttctatacgcttgaattaaaacaaatgaatgaattttctcatagctttttagatagtgattttggctggtttttccaggatattgattattttggtaaaaaatttgtcaatacttttggggtagtattagaggcccaattttttattgctatttgcaatacagtgattaccacgattggcctattatttatgcggatgccgcagatttttgccctatcgttaattgtgtttatctttagtttggttccggttgctggagtaattatttcaacaatcccattggcgatggttggttactcagtcggtggaattcgcgatgtggtttacattatcatcatgattatcatcatccatactttggaggcctacgtcttaaatcctaagtttatgtctagccggacagatctaccaatcttttatacttttatcgtattactgattggtgaacatctttttggtacatggggattgattgtgggggtaccaatctttaccttcttacttgatgtattaggcgtaaagcccattcgcggtgcaaaaagaataaaaaaagaagtgtgagtgagaattagccttgtgacgacgcgaagctatttccataatgtcttgctactattcatggaaacagttaaggctgggagaaaaagttttctcctagttttttgttatccgaacaatttatgttaattcattggataaagttaattaaaatcgaacttattttgcaaaattgctgaaaaagtcttgagttagtgtataataaaattaagataggtctaaagaaaggaagctgatattcatgacagacatcgagattgcagaccaagcgacactggaaccaattacagaaattgccgagaaactcggactttcagaagacgaaatcgaacaatatggtaagtataaagccaaaattgatttaaatgtaaagcctttacctgataaaaaacataagctaattttagttacgtccatcaaccctactcctgctggtgaagggaagtcgactgtcctcattggcttaggggatgcattaaatcagttaaattatcagacaacgattgcaatgcgtgaaccatcgatggggcctgtttttggaatcaaaggtggtgcaactggtggtggatatagtcaggttgttccaatggaagatattaacctgaactttaccggtgacttgcatgctcttacaagtgctaataatactttggccgctttaattgataactatattatgcgtgataatgcaatgaaccttgatccgcggcgaattatctggaaacgggtagaagacgttaatgatcgtgctctccgaaatgtagttaccggtcttggcggtccaatggctggtgttccacgtgaaacaggctttgacatcacagctgcttccgagttgatggcaattttatgtctatcaactagtcttcatgacttgaaagaacggattagtcgaattgtagtaggatatacatacgataaagaaccggtcacagttggccagcttaattttcaggatgcaattacaattatcttgaaagatgcattaaagcctaaccttgtccaaactttagaccatacgccaacaatcgtacatgggggaccatttgccaacattgcccatgggtgtaatagcgttttggcgacgcaaactgcccttaacctttctgactatactgtgacggaagctggctttggggctgaccttggtggggaaaaattccttgatattaaacaacgtgttcttggtaagcatccagatgcaattgtcatcgtagcgactgttcgagcgctagaatacaatggcggtgccaaacttgcagacttaaatgatgaaaatcttgatgcgctgaaaaaaggaatggcaaaccttaatcgtcacattaagaatatgcaattatatgggttaccaatcgtagttgcaatcaaccattttgtcagtgataccgataaagaaattcaaatgattaaggatgactgtgctaagcaaaatgttgaagcaattttgactgatgcttgggctaagggcggtaaaggtacccatgatttggctaataaagtagtcgaacttgctgatagtccaagtgaatttactcatatctatgacgttcaagttgatgaccttcaaactaagttagagaagattgctaagcagatttatggtgctaaagaagtatcatttagccgtaaagcacaaaatcaattgaagcgatttgctaagtatggatggaatgacttgccagtatgtattgctaagacccagtactcatttacagatgaccaaaaacaactcggtgccccaactgactttactttccatattcgggaattggtaccaaagatcggtgccggctttgtcgtggcattagctggtaatatgatgacaatgccaggcctccctaaagaaccagcggctgtaaacatgacgattgacgataatggtaaaattaccggattattctaaataaccaacacaaaacatcgattgtgcaataacgtacatcgatgtttttttcacaaacttttcaaggctagcgggttgaagttattgatatactgctatgtgaacttaatcgttttcttgtgaaattataaaataaggactacagtagaggtatatcgttttataagtttaattaggtagaggtgaatgactaatggaagagaaactacatggcgcagatattgttattgatagtttgagaaaacacggggttaatctcgtctttggtattcccggagcgaagattgatcgtttgtttgaaggactagatggtcaagacagtgaagatgcacctaaattaattgttacccggcatgagcaaaatgcggcgtttatggcccaagcttatggtcgcttaaccggaaaaacaggggtcgcgatcactacatctggcccaggagttggtaatttagcaactgggatcatgacagccaacgcagaaggagatccaatgttagcgattgggggacaagtacaacggaaagaccttcaccgctcaacccaccaaagcacgccttcaactgaaattatggcaccgattacgcaatatagcgctgaaattcaagaccctaataatatttcagaaattatggccaatgcatttgaagcgagtcaggatgcacgtaagggagcagctttcgttagtcttccacaagacgttgatgatgctgaggtaactgaaaagccattgccaatttatgaaacacctaagacgggtcctgctgatccaaatgacttacaaaaactagtcgaactaattaaaaatagtaaaatgccggttatcttagtcggtcaacggggcgcggatgaagaaattacgactgctatccgcaaattattaagtgattattcattgcctgttgttgaaacatatcaagcggctggagtagtatcacgtgacttagaacaacagtcatactttggacggattggccttttccgtaatcaagtaggagatcagcttcttcaacaaagcgaccttgttattgctgttggttatgatccgattgaatatgaaccacggaactggaacaaggaggggaatctgcgaattgtaaaccttgataccttgccagcgcaaattgataaccactatacgccaatcatgcaactagttggtaatattgctataagcttaacggagcttgataagttactaaaagggtatgaatatcctgttgcagccactgagcaactcgctaagtataagcaagaacttgaccaagataaaaagattcaagtaccaacaagcaatgatgccagccatccgttagcagttgtgcatgcaattcaagaaaatgttactgatgatatgcacgttgcgctcgatgtgggttcccactatatctggatggcacgacatttccgctgctaccagccacgacacttgttaatcagtaacgggatgcaaacactaggcgttggcttgccatgggcgatggttgcagcgatgctttatcccgaatataaatcagtggcagtttgcggggatggaggcttcctcttctctggggcggaattagcgacagccgttcaacaccatcttaatgttgtaacgattgtatggaatgatggcggtcattacgacatggttaagttccaggaagagatgaagtattcgcaagcagctggtgttaaatttggaaatgttgatatcgttaagtatgctgagagttttggtgcaactggactgcgagtaaataagccggctgaccttactaaggtactcagtcaagcgtttaatattgacggcccagttgtggtagatgtgccagttgattacagtaataataaagaattagctgccaacttgattgattcacaacttggctaagaggagaacaaagattatgacaacattatatgaacacggaacgttagctgcgttgatggcaggaaattttgatggcacaattactgtcggtaatttgctaaaacatggttcgatgggaatcggtacttttactggcttagacggtgaggttgttatcctgaataatgaagtgtaccaggccgtttcaagtggtcaagttaaccacattacagatatggatgctacaatgccatttgcttcagtccattttcctgctgaacaacaggatataacattaaggaatataaactttgctaaactgaataatgattttgttaaagaacatcagcttactaatgtttttgcattcttacaattgagtggtgagtttaagcacgtcaaaattcggattgctccgaagcaagaaaagccatacccgactttactcgatgttgcgcaacaccagcctgaatttgcggctgataatatcgcagggacaatcatcggctactatgcgccagaaatctttggaacaataacggcagcgggatggcaccttcactttatcagtgatgatcgacaatttgctggtcaccttctggcgtttgatgccccagaattaacaggtagctttgaaatttttgataacctggaacaacatctgccgattcataatcaagaatttcgggagagtacagttgatatggcaactttacgtgatggaattgctaaatcagaaggaaatgcagactaaagaacaaatgaagcagcggtataaataacgccgaaaaagggctccagtgctcggtaacgaactctggaaccctttttgtgatttctaaaatatcattttaagttgtcgtttttaatgagttgattaattagtagtcgcttggaaaaataatatttgcagatttacggagacggtatagagtcatattaacaattttagctagttcaatccatcgttgataattatcctgctgctgtggcgattcggggttagtaaagagttgtgcaaaatcgtttaactcgtcaaacatggtgttatctaagtagtggttattgataacttgaatactcccctgattattaagataagtcactttcttagtatcgaaaatactgtcaattattagcgtgtcgcgaagcctatatttattgccaaatgcttctgcggtgctaagcttacgggaatacacaacagtaagttaatatttccaagtatcttgtgctgcatgaatcatctagtcaaaaatagtatgggttccaataattcctaatcgtaacataagctagatttcctggttagccattttgtagatttataccatgtcatcataataaagaactttctgatcccttgtgcccaccggtagcattaggacatgattgtgacatttccatttctgcttggcaggtatttcaatagtgctttttacactaaatacctaaaccctgttttaaaaaatcgttcagttgaagttttggtgattcaagaatctaacccgaccggcaaaaattcattaccttactccaccagctaacagatgtggcggaccagcctgataagtaattttaaatccgcaatctcctttcacaagcttggttgacactaattgctgaaattaagtttcaagaacaacaccagcaattgacggttatcccacgtgaacgcagcaaaaatattttagcgtatttgcacaaacactatgcggaaaaggtaacaattaatgatagtgcaactgcggtcaatattagtcccaaagaatgtattcggtcatttaagaaaaacattcaccaaacgccaattgaatacttattaaattaccgggttgagcaggcaaagaaaatattgcggcattcggagctttcgatcacggatattgctttgcgggcgggatttagtacgagtgcctattttagtaaaatatttaaggaacgggtaggaatgacactacgggaataccggcagcgtcaagggtagcttactttaagtttaaaattttacttatcaatgtttccatgtctgctgggttaatgactttttcttggcgcggcgtttggtctactaacgcttggacaccatcgctaagctgatctcccagaagatcatgtaactgttgaagagcaggaagcccgatttgactaactttttggttggttagtgcgtggtagacggtttcagggaatttatatggactggcagttgacacgataactgtgggagttgtgtcatggctttgttgctgatattgatgtgttacatgtgatgccactgcagtatgcgggtcaataacatatccatcatttaaatatactcgtttaatttcggcttcaacttcatctggggtcgcaaaaccagccacaaattgctcctgaagcttatttaatacggtggaatctacctggtagtgaccgtcagtagctaattgcttcattaatttagcaactgttacgcagctttcatcataaagatcaaagaggagccgctcaagattacttgatactaaaatatccattgctggtgagttagttaggtaaaagttgcgtcgccgctcatattttccgctcttgaaaaagtcggtcaatacattgtttttattagaagcacacaagagcttgttaattggtaagcctaattttttagcgtagtaaccagcgaggatatcgccaaaattaccagtcggcacggtgaaattaactttctcccctagttggatcccgcctgtatgaacaagctgtccgtatgcagcaaaatagtacacaatttgggggataagccgcccgatattcattgaattagctgaggaaaagcagttattattttgcgcaaggcggtcattaaatgcttgatcgttgaaaatatgtttaacgcttgtttgggcatcatcaaaattacccttaattgcgattacgtggaggtttgatccaggctgccccagcatttggcgtaattgaaccggactaaccccgccagcagggtagaagacgattacctgtgtgtctttttgattgctaaaccctcgcattgcggctgttccagtatcaccagaagttgcggtgaggataacgatttgtttttctagttgggtgttttgtgcagcacgtgacactaattggggtaacatttgtaaggcgatatccttaaatgccagtgtcggcccgtgaaaaagttcaagataataattgctggcgtgtttgggcgttaatggggcaattaaacggttatcccactgactaccataagcggtatttgcatttttcagtagttggtcgctcgtaaattcatcaaaaaaccagttaagaatagttgcagcaagttgttggtacggcaacgaaattaaggttgcaaggttataagttggttgaggaaaatgaagcggtacataaagaccgccgtctggagaaagtccttgtaagatagcagttggtgattttaaaatcgttgataagtctccctgagtgctacggtagtccatgataattcctccaatttcaaaggtgattttattttaattgtatgtttcttatatgctatggtacaatgctgaaaatgaaaaaacaatgagaaactgaggcgggaaaatgaaaaacattaaactgggactgctcggtctgggtacggtcgggtcaggagtcttacagatggttcaacaaaatgcagataaaattctcgatgttactgggtgcaagttaacagttaaaacagctttagttcgaaaccttggtaactataataagtatgctgatgaaacttctttaacaactgattttgatgaaatcttgaatgatgatgaaataaaaattgtcgttgaacttatgggtggtattcatccggctaaagaatatattacaaccttattaaaaagtcataagaacgtggtcacagcgaacaaggatttgattgcgtcttatggcccagaattgatgactgtcgcgcatgaaaatcactgtgacttaatgtttgaagcgagtgtggctggtgggattcctattttgcggacgattgctaatagctttacggcagataaggttactgaagtaaagggaattgtaaatggaacaacgaattacatcttaacgcaaatgagccagcggggatggtcataccaccaagcacttgcccaagcacaacagctgggatttgcagagagtgatccaaccaatgacgtgacgggtaaggatgcggcttacaagatgattatattaagtcaatttgcatttggaactcaactagatattaaggacattgcggtagaagggattgaccgattgaatgacgctgatgttcaacaagcagcgtcatttggatacgtaattaaattactagggattaccaagctggttaataatggagtatttgtcgaagttggcccagtgttaatcccccgtgatcatcctttagcaacaatcaataatgaatttaatgcagtaatggttacagcccaagcagtcggtgatacgctcttctatggccgcggtgcagggggcttgccaactgctaacagtgtgttaagtgatattacaacggtaacgaaaaacattatcctgggaactaatgggaatctctttaataattaccaacaaccttatattccggcaaaacttgctgatataaaatatccatattatttatcgttaaccttgccggatgttcctgggcaaatgttgaagctaacccagatgatgacggatattaatgctagttttcgtgaaataacccaaacaaaagatggcaaaattgcgcacattgcaatcattactcaccggatgagcaaagaacaattacagacattactaactaaagtagctaatgatcagtcaattaacttgtcggcggcttataaagtgatgggataggaggaagtataatgattattcaagcacctgcttccagtgctaatcttggcccgggatttgactcgattgggattgcagtctctttgtatttaaaattagaagtccttggtccaagcgataactggcaagttgatcaccagcttgggaagctccctcatgatgagacgaatatgattgtaacaacggcattaagtgttgcaccggatttgctgccacagcacctgcaggtagtcagtgaaattccgatagcacatggattaggaagtagttcaagcgcaattgttgctggaatcgaattagcaaatcagcttaagaacctgaaccttagcaaggaagaaaaagttgagattgccagccagattgaaggccatcctgataatgtcgcaccgactattctagggggattagtagtggggacacatattaatgggcatttttctgcgattgaagcgcccttattcccctatgcttttgctgcatatatcccgccttataatctaaaaacagctgatgcgcgagctgccttgccatatcaactagaatattcccaagctgttcatgcgagcgcggttgctaatacctttgttgctagtttgtttgctaaaaactatgatgtagcgtttaaattaatggaggcagatcgctttcatgaaccatatcgcaaagagctagttccagaattagatcaaattcgtgaattaggaaaaaaacatggagcactagcaacatatttaagcggcgccggaccaacagtaatgacagttatcgataatgacaattacggattatttgaacaggcagtgcatgctgcggggctaaagggaaaagtagtccgtttacacccagatgttgaaggagttaaactaatataatttaggaaagaggctggaaatggattcggccttttttcttttttatgaattttaacgaactattttatgttttaactttattaagttcgatttttacattgaattataaaaaaatctttgctatccttaaagcagatttgaggaggcattgttatgagtgatattagtgtagtaatgggcagtaaatcagactggccaactgttaaagaaacttgtgatattttagatgaatttggcgtttcatatgaaaagaacgtgatttctgctcatcggatgccaaatgaaatgttcgcgtttgcgcaaaatgcggttgataatggggtcaaagtaataattgcatgtgccgggggagcagcccatcttcccggaatgattgcggcaaatacccccctgccagtaattgggatcccaggacagacaaaagctcttggtggcatggactcgcttttatcaattgttcaaatgccagcgggaattccggtggcaaccactgcgattggaaaagcaggcgctaaaaatgcagcgttattagcattgcaaattcttgggatcacagataagcatatccaacaacaaattatcgaatatcgacaggcgatgcatgatcaagcaaaagaaagtgggcagtatcttgaataaatttattccacaaggctcaactattggcattattggtggtggccaattgggacagatgatggcattggatgccaaacagacggggatgaaggttattattttagatccgacaccaaattgtccagcggggcaggttgctgatgaacaaattgttgctccttatgccgatactaaagcgattgaaaagttagctgataaagcggatgtattaacctacgaatttgaaaatgttgatttaaacgctttggaagatgtacaggatcgcgtttatcttccccagggaactaatttgctttacacgaccaaaaatcgtttacgggaaaagaatttcttacgtcaggcaggggtaaaaacagcacctttcatggaagtgcatacttctgctgaattaaaagatgcagtaaagaaaatcggttacccagcagttttgaaaactagtgaagggggatatgacggacacggtcaagaagtattacgtaataaggatgacctcgataagtgtgcgtctattttagccactggcgactgtatcttagaaggctgggttccttttaaccgcgaatgttcagtaatggttggacgtaatgaagatggagaaataacggcttttcctgtttcagaaaatattcaccatgatgaaattctacatttaagtattgtcccagcaagaatctcttctgaattacaacaaaaggcgcaaaaaatagcggtgcagattgcccaagcgattaatttgcgagggattttaggggttgaaatgtttgtaacagatgatggagagatctatattaatgagcttgctcctcgtcctcacaattctggtcattattcaattgaagcttgtaacttttcacagttcgccatccataatcgagcaatttgtaactggccactcccacaagtagagttattaaagccggtggtaatggtaaatgttttaggtcagcatgttaatggagtccgacaacagattcagaaaaaggcaaattggcattttcatgattatgggaaagcagaagttcgtcataaccggaaaatgggccacgttacaatcttgactgatgatattgaagctactttagcagaaattgacaatacaggtatctggggtgcataaagttcggctttacgtaaccgcttttcctgtgcgataatacatttagaaaaaatagagaggatttttaactgatgattgatcgttataccagtccagagatgaaaaagatttggagcttagaaacacaataccaatgttggttagatgttgagattgctgctgatgaagcgtggagtaagcttgggcatattccagcagaagatgtggaaaagattaaaaagaatgccaagttttctgtggagggaattgcagagattgaagcagtgactcatcatgatgtgattgcttttacccgtgatgtttctaaatcattggggcctgaacgaaagtgggttcactacggaatgacgagtacagatgtagttgatactgcacaaggcttgcgattaaaaaaggcgaacgatatccttcgtcaagatattgataactttatggatgtccttaaagaattagctgaaaaatataagtacacagtttgtatgggacgaacacatggtatccatgctgaaccaacaacttttggcttgaaagctgctcggtggtattcagaaatgaagcgtaataaagaacgttttgaacatgctgctaagggtgtcgaagcgggtaaaatttctggtgcagtaggaacttttgctgaaattgacccatttgttgaggaatatgtctgcaaaaaacttggcttacgtcctcaagaaatctccacacaagttcttccgcgagatttacatgctgaatatattgctaccattgcgcttattggaacaagtatggaagaaatggcaaccgagattcgctctcttcaacgaacggaaatccatgaagtcgaagaacactttgccaagggacaaaaaggatcttctgctatgccacataagcgtaatccaattggctcagaaaacattactggttgtgcgcggatgctccgtggctttatggtgcctgcttatgaagatgtttcgctttggcatgaacgggatatttctcattccagtgcagagagaatgattttaccagatgcaacttcattacttgattacatgttgcggcgttttggtcgaatcttaaagaatctcgatgtattccctgaaacaatgaagaagaatatggacaagacattgggcttaatttacagtggtcgggttcttttgaagttggttaacagtggaatgactcgggaagcagcttatgatttgattcaaccatataccgctaagtgctgggcagaacagattccgttccgtccattattggaagatgacccaacaattcaaaagcaattaactaaagaagatcttgatgatgcctttgattaccactggcacctccgccatgttgatgacatttataaaaggttgggattagactaatttaagttagtttaagaggctagacgaacaaaaaagtttgcctagcctttttattatgctttgtttagtaaaacacgaacaatttgaactgaaaatcatataaatatcgtaattcgtattgacaatcgggagggggaaagagtatattgttgtcatgaaatatcgaattaattttcggatattaaaataaatgttcgttttttactgaaaggaagttccgtaaatggagaagttattgtataccggcaaggcaaagcagatgtggcaaactgaggatccagcggttttacgagtagtttatctggaccaagctaccgccctcaacggaaaaaagaaggatcactttactggtaagggtaaggctgccaatgctatttcttccctcgtttttggttacttaatgaagcaaggaattgagacccactttattaagaaactatcaactaacgaagaccttgtaaaaaaatgtgagatgttcccgcttgaatttgtaacgcggaatgtaattgctggccattttgcaagtcggtatggactttcagaaggggaagagcttccttcaccagttgaggaaacgttctataaaagcgatgagcttaatgatccctttatcaatgaatccgcaacgattgctcttgagattgccagcaaagaggagcttgcgcaaatgtgggggatctgtcggaaggtcaataacttacttaaaccattatttgccaaagctaatttacggttggttgacttcaaactcgaatttggccgtttaagtgatggcaagattattcttgcagatgaattttcgccagataactgtcggttatgggatctgacaactatgcagcatatggataaagacgtatatcgacgcaaacttgctgatttaacccaaacatatgatgaggtattggaacggttagaagcagtgatgaaggaggaagcataaatggttaacgttcggattttcgtaacatataagcaatcagtctttgatccgcagggagaaacaattaaggatgcgatccattctctaggtcatgatgaagtaactgccgttaaagttggaaaattttttgacgttaccttggatacaaatgaggatgaggtagcaacggcagtaaaagaaattgccgatcagctccttgttaatttcaatatggaaacttatacataccaagttatggaggaagcctagatgaaaattgcggtggttgtttttccaggatccaattgcgatgtggatttatatgaagcccttcattccgtttgtcatgcagatgtggagtatgtttctcaccggcaaaaaagtttagctggttttgatgctgtgatgttaccaggaggattttcctatggtgattatctacgagctggcgcaattgctcggtttaccaatatcatgcctgcaataatcaaaatggcaaatgagggtaaaccagtctttggaacgtgtaacggatttcaaattttgacagaagcaggtcttttgccaggtggactcaaacgcaatgatagccaacgctttgtttgtaaaactgttcctttagaagtagtgaactcgcaaactctttttactagtcattaccaggatcacgaacgaatcgcattaccaattgcgcatgccgatggtagttactatgcagatgaaaaaacattagatgaactggaagcaaataatcaaattgtttttcgttacgcgactgaaaatccaaatggtagtttacgcaacattgctggaattactaataagcacggaaatgtcttaggcatgatgccccatcctgaacgggcagtagaaactattcttggcagtacggatggcttacggttatttgaatccttgttagaaaacggcagaattaaagtggaggcatagttaatgaagcaagcaatgaccccagaagagattaaagaaaagaaaccatacttagattggagcttgacagaagcagaatatgattacattcgtacccagctcttggggcgattaccaaattatactgaaactggcttattttctgcgatgtggagtgagcactgttcatataaaaagtcaaagccggttctgcgtctcttccctaataaaaatgagcgagtattgcaaggtcccggagaaggagcaggggttgttgatattgatgatggacaagcggtggtattcaaagctgaaagtcacaatcatccgacaactgttgaaccttatcaaggagcagcaaccggtgtcggtggaatcctgcgagatattttcagcatgggggcacgaccaatcgcttcccttgattccctccatttcggtgaattagataattcgacaacgcggatgaaagtaactaataccgttcggggaattggtgattacggtaattgtatgggaattcctacaattgcgggtgaaacaacatttgatccatgctaccagggcaatattctgtgtaatgcaatgagtgtcggcttaatggaccagaaagatatccagcagggtcgcgctgccggaattggaaatgcagtgatgtatgtcggcgctaaaaccggccgtgatggaattcatggcgccacctttgcttccgcagactttaatgatgaaaatacgacgcaacgttcggcggttcaagttggtaatccttttatggaaaaactcttattagaagcctgtcttgaccttattagaaatcatccagactggttagtaggaatccaagatatgggggcagcagggattgtttcttcaagtgcggaaatggcttccgaaggtaaaagtggaatggagctaaatttggatcttgttccgcaacgtgaacccgggatgtcggcttatgaaattatgcttagtgaatcccaagaacggatgctactttgcgtaaaaaaaggtcatgaagaagatgtcaaaaagatttttgatttttacgatcttgaagcggtcacaattggccggattactgcgggtcatgattatgttctctttcatgatggtgaagaagtatgtcatatcccagtgtcgagtttaacggatgacgtactagaagaagaaagcctcgaaaaaaagcctgcgcggattgaattagccgagcagcagccagcgtggattccagatgttgataacgttgctgaagttttaactgccttgcttgctcagtcaacgattgcggataaaagtagtctttatcagcaatatgattctcaagtacggacaaacacagtggctgggcccgggagtgatgctggagttctgcggattcgtggaacacataaagggttagcgatgacaactgatgggaacggtcggtttgtttaccttagtccagaagttggtggacaaattgccttagttgaagcagctgccaacataattgccagtggagctgagccgttagcaattactgactgcttaaattatggtgacccaactgatccagaaattttctgggaacttcatcaatctgttcaagggatggctgatgcttgccgtgaatttaatactccggttatttctgggaatgtttctttatataacgaaaacaatgggcaagcaattcatccgacgccgatggttggaatggttggtctaattaaaaatattgatcgcgtaattccttcgtttgtccaatacccgggagataaggtttatctagtgggccaaactcgtgatgattatgcggggtctgagttgcaaaaaatgatgaccggcgatattagcggaattgttaagtcatttgaccttcaccatgttcatcaatatatgcaacgtttactgacgacgatggagaacggccttgtttccagtgcccatgatttgagtgaaggtggtctcggagtagccttagcagaaacggtcttcaaaactgatttagggttgaaagttgactttgctgatcagccagcagttcgcctgtttagtgagactcctggaagatttatcgtgacggttgctcctgaaaaggcaaccgaattcgaacaggcattaggaaaagatgcacacctaattggagaagttacaaatagccactggttaatggttaaactggcaaatggtgaactcaatgaaagtgttgcaaaattacaaaaaacatgggaggaggcaattccgtgccaactgaaatcaaaggattaaatgaagaatgtggggtctttggggtttttgatgcggctaacgctagtcaattaacctattacggcctgcatactcttcaacatcgcggccaagaaggagccggtattgtctcaactgatggaacggaactttatcagcaccgtgaccgaggattgttggcgaaagtgtttgctgatccggctgagcttaaacgattaaaaggaaacgctgcgattggccatgtgcgttatgggacaagtggacataactcgatttccaatgttcaacccttcctttttcactttcatgatggcgccgttgcccttgcccataatggtaatttaactaatgctgttacccttcgtcgtgaattggaaaatgaaggggcagttttccagtcagattctgatacggaaattttaattcaccttatccggaaatatattaatgaaggttttattcctgctttgaagaaaagcctcaaccttgtccatggtggatttgcctacctattactgcaaaaagatcggttgattgcggctttggatcctaatgggattcgtcctttatgtattggaaggttagaaaatggtgcttatgttgttgctagtgagacttgtgctttagatattattagtgctcaatttgtgcgtgatgttttgccaggagaattaatagttattgataaaaatgggttacatattgaccattacactacccaaactcagctggcaatttgctcaatggagtatatctattttgcccgtcctgattctattattcatggggtaacggtacataatgcgcggaaacgaatgggaaagttattagcaaaggaacatccggttgatgctgatatggtgattggagtacctaactcatcgttgtctgctgctagtggatatgctgaagaaagtggccttccatatgaaatggggttaataaagagccaatatgttgcgcgaacgtttattcaaccaactcaagagttacgggagttaggcgttcatatgaaactgtcagctgtccgcggagttgtaaaaggaaaaagagtggtagtagtcgacgattcgattgtgcgcggaacaacttctaagcagattgtccaaatgctaaaaagagctggggctaaagaaattcatatgcttatttcctcaccaccatttaagtttccgtgtttctatgggattgacgtatcaacgcgttcagaactgatggctgctcattactccattgaagaaatgcggcagttaattggtgcagattctcttaactttttgagtattgatagtttaatcaaagcaattaacgtaccagatgcaggagatgctcctaatggtggacttaccgtggcttattttgatgggaagtacccaacgccactttatgattatgaagaagggtacttaaagtcgttaagcgaacaagagcgattagcaagaaaggggtaagaggatgagtcgttatcaagatgcaggggtggatgtaaatgccgggtacgaacttgttcaccgtattaaagatgcagtcaaatcaactgatcgcccaggggtgattgggggaattggcagctttggggggatgtttgacttagaaaaattacaggtacggcatccggtccttgtctctggcactgatggtgtgggaacgaaactcttaattgcccaacaaatgaataagcacgatacaatcgggatcgatgttgtcgcaatgtgcgttaatgatgtcttggcgcagggagcggaaccaataacatttctcgactacattgcgaccggccataatgatccggctaagatggcagcgattgttagcggagtagcgactggttgccgagaagctggagccgctttaattggtggagaaacagcagaaatgccagatatgtatgcagccaatgagtatgacctggcaggaacagtaacagggatagcagaaaaagaagaacttcttaccgctgctggaccgcaaaaaggtgatattttacttggcctcccatcaagtggcttgcattccaatggcttttcccttgtccggcagatcttatttaaggataatcacgtcaaattaactgatcgcccagaagccttgagaggaaagacggtaggagaaacgatcctgactcctactaggatttatgttcaagcggtcttgccattagtccatcgcaaattggttcatgggattagccatattactggtggaggattgattgaaaatgttccccggatgttagaagataacttgcaagcggtgattgatcctggtcggtggccacagcttccggtctttgactatttgcgggtgctaggaggccttactaaggaagattgtttcgaagcatttaacatgggaataggaatggtcttagcagtagcaccagatcaagtagcacaagttcaagagatactatcaaataaaaacatgacaagttatcaaattggttatcttcgtcattgtttaccagatacaaaaaagattgttatcaagtgagggttgtaaatgagagtcgcaattttagcatcaggaaacggaacgaattttgaagtcttagcacagcacttcaaaaataatgatcttcctggtgaattagcattattattctgtaatcatccagatgctccggtaatgaaaagagctgcccgactggggattccggcagaaagctttacggtcaaatcttgtgggggaaaacaggaatacgaggaaaaattattgggagtgttgaaaaagtatcaaattgactttattgcccttgctggttatttacgagtaattgggcccactattttggatcattatgctcaccaaattattaaccttcatccagcatggttgccagaatatccgggactacattcgattgaacgggcatttgctgatcaacaagcccagacaggcgtcaccgtacactatattgatgcgggactcgattccggcccaattatcgcccaggaacacgtcccaattttaccaactgatactattgaaaccttagaagcacgggttcatgaaactgagcaccggttatatcctgaagcactaaagcaggcattagaaaaggagcaacattaaattatgaaaagagcattagtaagcgtttctgataagcaaaacctggtcccattcgttaaaggattagttgaaaatggttttgaaattatctcgactggtgggacgaagcgggttttagatgaagcgggaattgaaacaattgggattgaggatgttactcattttccggaaattcttgatggccgcgtaaagactcttaacccatacgtccatgggggactattggctcgccgggacttaccggaacacatggcgaccctcgaaaaacttaatattacgccaatcgatttagtctgtgttaatctttatccatttaaagagacgatcgaaaagccgggagtggaattagccgatgcaattgaaaatattgatattggtggtcctagcatggtccgctcagctgctaaaaactatcatgatgtaacaatcgtggtggaccaagccgattacgatgaagtcttagcccaaatcaaagaagatggtgaaacatcattagcaactcgagcacgcttagcagcgaaagcctttcgtcatacggcagcctatgattccctcatctctcaatacctcacaaaacagacagggcttgaagatccagaaaaattaactttaagctgggatttaaaagaaacaatgcgttatggtgaaaatagtcaccaaaaggcttggttatatgaagacgcgcttcctaaggctttttcagttttacaggctaaacaattacatggtaagaagctttcctacaataatattaaagatgctgatgaagcattacggtgcattcgcgaatttgatgaaccaacagttgtagcgatgaaacatatgaacccatgtggcattggccgaggggatagtttggttcaagcttgggatcgtgcctatgaagctgaccctgtttctatttttgggggagtgattgctcttaatcggcaagttgatttagctaccgccgagaaaatgcacaaaatctttttagaaattgtcattgcacccggctttgacgatgatgcatttgagttattggcaaagaagaaaaatattcgtttgttgagtctggactttagtaagaaggatgaaccaactaaacatgaagttgtttcagtgatgggtggaatgttgttgcaggaacaagacacgcttaaggaagattaccacgactggcaatgtgttactgaaaagcaaccaacagaggaacagcttaagacattaatgtttgcctggaaagcagttaagcatgccaaatcaaatgcgattgtcttagcaaatgatgagcggacattaggggtcggagaaggtcaacctaaccgaattgattcattgaaaattgccgtaaaacatgctggcgaggcgattgatgaccggacagtgatggcatcggatgctttcttcccatttggtgattgtgttgaatatgcgggtcaaaatggcattaaggcgattgttcagccaggaggatcaattcgcgatcaagaatcaattgagatggcaaataagtacggaattgcaatggtcacaacaggcattcgtcatttccgccattaaagctaggagggtatcatggaaaagcaggtcaacgtattagttgtaggtgaaggcggtcgtgaatttgccgtggcgaaaaaattacaagaaagtccccgtgttaagcaagtttattgtgcgccaggcaacgtggggatgtcgactgtaggagtagttcccattgcaattgcggaaactgactttgctaagctgattcaatttgctaaagaacataatgtcgcgtggacattcgtgggccctgaggattgcttggttgatgggattgttgatgaatttaaggccgctggattaaaggtttttggtcctgatgcgcgggctgcccaattagaaggctcgaaagactatgcccttaattttatgaataattatcacgttcccactgcccgccatgcgacatatagggatcaaacagcagcgattaataacgttgggcaatttggctttccagtagtaattaaagaaaatggtttagctggaggaaaaggggttgtcattgcaaaagatcgtgcagaagcaattaagacaatcaaagaaatgtttgtcaatggtcaggcgcgccttgtgattgaagaatgtctatcaggtcctgaatattcaatgtttgttttgattagtaatggccactaccgaattttgcccatggctcaagaccacaagcgagcatttgatgacgataaaggtcctaatactggggggatgggggcttatagtcccttgccacaactttcctcagccgttcgtcaacagatgattgatgaagtacttaagccaacaattgatggtttggtggctggcgagtatcactaccatgggattttatatattggccttattttgactgataatggtccaaaagtgattgaatataatgttcgtctaggtgatccagagacccaggtgattttgccccgcatgaaaaccgacttgttcgaacttgtagacgcagcaattaatgatcgaccattaccagaagttgaagaaaatgaagatgcttgttttggtgttgttttggcatcgaaagggtatccaactaagccaatccacggccaaaagctgggaacatttccagttgatcctaatgttactattgattacgcaaatgttgctggaacaattaatgacttaaaaggtgcaggtgggcgtttgctaatggtgatcgggaaagatgattctcttcaaaaagcccgcgatcacgtttatggctacttgcgccagcttgatgaacctgaatgtttttatcgtcatgatattggtgcaaaagctggactgcaataatttcttcatcactattggcatttgcaggggaatggattaaaataatatggtaatgctgtttatagcgattttaagaagaaagaggtcaattgaacatggctaaattagtattaattcgtcacggtcaaagtgaatggaacttatctaaccaatttactggttgggttgatgttgatttaagtgaaaagggtgttgaacaagcaaagaatgctggtaaagcccttaaggaacacggcattgaatttgactacgcatacacttctgttttgaagcgtgctatcaagactttgcactatgctcttgaagaatgtgaccaattatggatccctgaatacaagacttggcgtttaaacgaacgtcactatggtgcacttcaaggccacaacaagcaaaaggccgctgaaaagtatggtgacgaacaagttcacatttggcgtcgttcatacgatgtattacctccattgctaagcgctgacgatgaaggttctgctgcaaaggatcgtcgttacgctaacttagacccacgtgctattcctggtggtgaaaacttaaaggttactttggaacgtgttattccattatggcaagatgaaattgcgccaaagcttttggacaacaagaacgttatcatcgctgcccacggtaactctcttcgtgcattgagcaagtacatcgaaaacatttctgatgaagacatcatgaaccttgaaatggctactggtcaaccggttgtttacgacttcgatgacaagcttaacgtattaagcaaggaaaagtactaaaataaacttacgatattaaatttgaagaggcgggaaagttagattcctaacgccttttttttgtagcttttttgaagaaatgttgaagatattgatgaataaattgagcttatagtgagttgtggtatgattaacatcagaatctaataaggtggagagaatttaaatgaaaatggaaaaacaacgaacactcccaatgaaggaattttacctttcattgaaacaactggtaaagcctaactatttaaaggcaatgtggccagttgcaggggtatcaattatttttattgctttagcagcgatcttagcactccttaattcaaacattgctgcctcattgagtatgacgatgatgatggtaatgtacgggatggcttccccggttgcaatcttgttctcattattagaaattgtagggattgtcgcaattattgctgcgttagccttcttctatactttctttgcagttgctacccaatatacatatcaggataagatggctcatccagaacaaccagttagtgctggatcaatatggatgcactataagcacttgcgaaaaaaccaagtatggcggattattctttacattggattgtttactttcttatggagtttgcccctcaacattgttaacgcattactcttgccacatttatccggagtagccgctgtttatacggggtgggcaattcgcatccttaatgatattgtcgtattatggaagagtattgaatattctcaatcatacttcctttatcgtgaaaagcagccacaattccttagccaatcaatgcgttatgctttaactgctagtcggcggttcatgactggtcgaaagtggaactactttgcaattctgtttattttagaattccttccaatgtttatctggactttaatttttggtggattggcattttacggcgtttatacggcaacttatgtccttacttatatcggaatcgttttagtggttgttggtatttcctgctaccttccagtggtatatgcaattcttgctttgtactacaacaaggctcgagcaggaatggaaatggatgtgctttttaaggatacttttaagccagtagccgaattaaccggtgaagcttatgttcatgaagtatatgtagaaaaacaaccaaaagaacaaccatcaccaactgttaagcgtgatgatgaaaagaaacacgaagcaaaaaaagatgaatagtgaagcgaaaagctgaagggtaacgaaaactcttcagcttttttgtattttaaatacttcttgacagtaatcattaattccatgtacaatgacggcaataaccaaagatgaagaagtaatcttagtagtaagcggttggacatttaggaagcaagtggtaactgtaaactttgccaatgccgttatacgaattacacttacggagtctttcagtatttgaacggatcgtctcgttatcgactagagtggtagctatttagctgcaaatcaaggtggtaacgcggtaaatcgtccctgacttcattatttgaagttggggattttttgtatccgagaaatttatggaggtaaacatggatattcttaatgaactagaatggcgtggggctattaaccaagttacagacgaagaaggcctacgcaaattaacatcagaagataaaattgctctttactgtggaactgatccaaccggggatagtcttcatattggacacttaattccatttatgattttgaaacgatttcaattagctggccaccatccagtaattattattgggggaggaactggtgcaattggtgatccatccggtcgaaagtcagaacggcaacttcaaaccatggatcaagttcaccacaacgaagaagcattaactgctcaaatgaagaagttgttcggcactgaaaacttcacgattgtaaataactatgaatggttatcaaagatcagcttgttagactttcttcgtgactacggtaaactatttaatatcaacaccatgttaaataaggaagtagtagcaagccggttagatgctggtatttcatttactgagttcacttatcaaattcttcaatcagtcgatttccttcatctttaccgtcacaatgatgtgcaattacagattggcggctccgatcaatggggaaatatcactgccggaattgatttgattcataaggttgaaggaccagatactaaggtttacggacttactattccattaatgctcaaagctgatggaactaaatttggaaagaccgcgggtggtgcaatttggcttgatccagaaaagacctctccatacgaattttatcaattctggattaaccaagatgaccgtgacgttattaaatacttgaagtacttcactttcttatcaaaggaagaaattgatgacttggcagaaaaagttgagaaggaaccatggaagcgagaggctcaacgtcgcttagcccaagaagtaactaaatttgttcatggccaagaagcagttgaagaagcagaacggattagtaaagcattgttctctggggatgttactgacctttctgttgcagaaattgaacaaggctttaagaatatgccttcagtagatgtagaaaataagaaagaaaatattgttttatggttaaccgataatggcattgaatcttcacgtcgccaagctcggcaagatgtatcgagtggagctatcaggattaatggggaaaaagttgatgatgttgacgccgagattgatccccaagcacattttgatggtaagtttgtgattgttcgaaagggtaagaagcactattacttagctcgcgtaaaataaattagaccaattgttagcaaatacgttcttaaaagatgatttaagggcgtattttttatttttagatataaaaaaacaaattttttctatttcgaataataaaaaggttcaggtttaaaaaataaattaaaaaagttgaaaaaaggtgttgacgaaagaatgaaatccatgtatagtagttatcgttgtcaaaacagctaagtgctgttgagatggtttaacaaaaaagttaaaataattgttgacatcgacttggcaacatgatatattaataaagttgctgattgagttatcgatcaaaagaaattaaaaaataatttaaaatttcttcttgacaagttaatctgatacatgatataatgaaattgttgattggctgcttaattaaccgacaggtagacctttgaaaactgaacaaagtttcgacgaatcaaatgtgtagggtcttcaatcacgatgtgatttgaagcaaaacatttgcgaagtcaattcgcttaataacaaagataattgagagctattcaagttcttatatattttatatgagagtttgatcctggctcaggatgaacgccggcggtgtgcctaatacatgcaagtcgtacgcactggcccaactgattgatggtgcttgcacctgattgacgatggattaccagtgagtggcggacgggtgagtaacacgtaggtaacctgccccggagcgggggataacatttggaaacagatgctaataccgcataacaacaaaagccacatggcttttgtttgaaagatggctttggctatcactctgggatggacctgcggtgcattagctagttggtaaggtaacggcttaccaaggcgatgatgcatagccgagttgagagactgatcggccacaatggaactgagacacggtccatactcctacgggaggcagcagtagggaatcttccacaatgggcgcaagcctgatggagcaacaccgcgtgagtgaagaagggtttcggctcgtaaagctctgttgttggagaagaacgtgcgtgagagtaactgttcacgcagtgacggtatccaaccagaaagtcacggctaactacgtgccagcagccgcggtaatacgtaggtggcaagcgttatccggatttattgggcgtaaagcgagcgcaggcggttgcttaggtctgatgtgaaagccttcggcttaaccgaagaagtgcatcggaaaccgggcgacttgagtgcagaagaggacagtggaactccatgtgtagcggtggaatgcgtagatatatggaagaacaccagtggcgaaggcggctgtctggtctgcaactgacgctgaggctcgaaagcatgggtagcgaacaggattagataccctggtagtccatgccgtaaacgatgagtgctaggtgttggagggtttccgcccttcagtgccggagctaacgcattaagcactccgcctggggagtacgaccgcaaggttgaaactcaaaggaattgacggggcccgcacaagcggtggagcatgtggtttaattcgaagctacgcgaagaaccttaccaggtcttgacatcttgcgctaaccttagagataaggcgttcccttcggggacgcaatgacaggtggtgcatggtcgtcgtcagctcgtgtcgtgagatgttgggttaagtcccgcaacgagcgcaacccttgttactagttgccagcattaagttgggcactctagtgagactgccggtgacaaaccggaggaaggtggggacgacgtcagatcatcatgccccttatgacctgggctacacacgtgctacaatggacggtacaacgagtcgcaagctcgcgagagtaagctaatctcttaaagccgttctcagttcggactgtaggctgcaactcgcctacacgaagtcggaatcgctagtaatcgcggatcagcatgccgcggtgaatacgttcccgggccttgtacacaccgcccgtcacaccatgggagtttgtaacgcccaaagtcggtggcctaacctttatggagggagccgcctaaggcgggacagatgactggggtgaagtcgtaacaaggtagccgtaggagaacctgcggctggatcacctcctttctaaggaataaaacggaacctacacatcgaagaaactttgtttagttttgaggggtttaccctcagagcttgtactttgaaaactaaatactatctaatttctttattaacaaaacaataaaccgagaacaccgcgttatttgagttttaattaacgaattataatcgctaactcaattaatcagacaatctttgattgtttaggttaagttatgaagggcgcatggtgaatgccttggtactaggagccgatgaaggacgggactaacaccgatatgcttcggggagcggtaagtacgctttgatccggagatttccgaatggggcaacccaatcagcttagtcgctgattacttgactagtgaatacatagctagcaagaggtagacgcagtgaactgaaacatcttagtagctgcaggaagagaaagaaacatcgattccctgagtagcggcgagcgaaaagggaagagcccaaaccaacaagcttgcttgttggggttgtaggactgaatattagagttaccaaagtgcgacgtagtcgcaacagttgggaagctgtgccatagagggtgagagccccgtagacgaaacgtcacactctctgttcaggatcctgagtacggcgggacacgtgaaaccccgtcggaacccgcgaggaccatctcgcaaggctaaatactccctagtgaccgatagtgaaccagtaccgtgagggaaaggtgaaaagcaccccggaaggggagtgaaatagttcctgaaaccatgtgcctacaagctgtcggagcccgttaatgggtgacggcgtgcctcttgcagaatgaaccggcgagttacgattacatgcaaggttaaggtggaaaaaccggagccgtagcgaaagcgagtcttaaatgggcgtaaaaagtatgtagttgtagacccgaaaccaggtgacctacccatgtccaggttgaaggtgcggtaaagcgcactggaggaccgaacccgtgtcagttgaaaatggctgggatgaggtgtgggtagcggtgaaattccaaacgaacttggagatagctggttctctccgaaatctctttagggggagccttgaggtaaagaatcgtggaggtagagctactgtttggacaaggggcccgtcatgggttaccaacttcagataaactccgaatgccatcgatttatactcaggagtcagacgatgagtgataagatccaccgtcgaaaggggaacagcccagatcaccagttaaggtccctaaatatatgctaagtggaaaaggatgtggagttgcatagacaactaggatgttggcttagaagcagccaccatttaaagagtgcgtaatagctcactagtcgagtgatcctgcgccgaaaatgtaccggggctaagcatattaccgaaactgtggatgtgcactatgtgcacgtgataggagagcgttctaagggcggcgaagtcagaccgtgaggactggtggagcgcttagaagtgagaatgccggtatgagtagcgaaagacaggtgagaatcctgtccaccgaatgactaaggtttcctggggaaggctcgtcctcccagggtaagtcgggacctaagccgaggccgagaggcgtaggcgatggataacaggttgagattcctgtaccagttaactgcgtttgacgatggagggacgcaggaggctaagcaaaccgtacgactggaagagtacggccaagcagtaagtcaggatgtgagtcaaatgtttacatccgcgttgacaagctgtgatggggagcgaaattaaagtagcgaagttgccgatgtcacactgccgagaaaagcttctaaggagtagttaactgcccgtaccgcaaaccgacacaggtagtcgaggagagaatcctaaggtgagcgagagaactctcgttaaggaactcggcaaaatgaccccgtaacttcgggagaaggggtgctggccgcaaggccagccgcagtgaataggcccaggcgactgtttatcaaaaacacaggtttctgcaaaatcgtaagatgaagtataggggctgacgcctgcccggtgctggaaggttaaaaggatgggttagcttcggcgaagctcagaattgaagccccagtaaacggcggccgtaactataacggtcctaaggtagcgaaattccttgtcgggtaagttccgacccgcacgaaaggcgtaacgatctgggcgctgtctcaacgagagactcggtgaaattgaaatccctgtgaagatgcagggtacccgcgacaggacggaaagaccccatggagctttactgtagcttgatattgagtgtttgtactgcttgtacaggataggtaggagccgtagaagtcgggacgctagtttcgacagaggcgctggtgggatactacccttgcaatatgaccactctaacccgcagcactgaacgtgctgggagacagtgtcaggtgggcagtttgactggggcggtcgcctcctaaaaggtaacggaggcgcccaaaggttcgctcagtatggttggaaatcatgcgcagagtgtaaaggcacaagcgagcttgactgcgagacagacaggtcgagcagggacgaaagtcgggcttagtgatccggtggttccgtatggaagggccatcgctcaacggataaaagctaccctggggataacaggcttatctcccccaagagtccacatcgacggggaggtttggcacctcgatgtcggctcatcgcatcctggggctgtagtcggtcccaagggttgggctgttcgcccattaaagcggtacgcgagctgggttcagaacgtcgtgagacagttcggtccctatccgtcgcgggcgtaggaaatttgagaggacctgtccttagtacgagaggaccgggatggacataccgctggtgtaccagttgttccgccaggagcaccgctgggtagctatgtatggacgagataaacgctgaaagcatctaagtgtgaaactcgcctcgagatgagatttcccatttccttcgggaaagtaagacccctcagagatgatgaggtagataggatggaagtggaagtgccgtgaggcatggagcggaccattactaatcggtcgaggacttaaccaaggagcggtaaggtttattggaagagaatagataggatttagttttgagagcacaagctctcgtccgaagggacaaagagtgtggtgatgatggcttgaaggatacacctgttcccatgccgaacacagaagttaagcttcaacacgccgaaagtagttgggggatcgctccctgcgaggataggacgttgccatgcgatcaaaacgtgaaccggttaaacgattcgcgtcttttctttaataatagtttctggtataattaattaggaattgttattatgctgacttagctcagttggcagagcacgtcactagtaatgatgaggtcggaggttcgaatcctctagtcagcataattaaaacttacaaagtttattaatccttgatatatcaacgttttacgaagatgtattagggattatttttgtttatttaagaatgttatgcacacggctgtgcacacaaaataatcgtgtgcatgagcttgcatcggagaagtgcgtaaaccattgatatattaggctttatagattattttttgtgtgcatttaactgcttttgctatgatatagtgatgaggtcggatattcgaatcttctagtcagcactagatagtgtaggatagcctattataacgctgtttatggacgttataataggctattttatatacaaatatgttatcagtttctcacttttttctcacgtgaacactaaatggttgttttgaatttttgagaagtagcgctaatgcagttatatcaaccatttaagctgttagagtgtgtgaaaaagtgtgaaatgaagattaaaagtatatcgttaaaataatataaataattttagatattaagtatattgttttcttcagaaaatatagagaaaaattcaataagatgaagggctttgattttctaattaaagccttttaattataggttgaagaagaaagtttttaggatcaaatttggatagtatataaccatttttgaatattattcttatttaagcagatcacaatatgttataaaattaaaataagggtatgttatgagtgcaaataggagtaaaaaatggttaataaaaaagagttgtctgaagaagatgtaaaaacaagatatattactcctgctattgaggacaaaggatggactcctcaagactggcgtatggagtatgagtacacggatggaagaattactgttgttaacaatacaaccaaacgtggagaacgtaagaaaatagattatctattaaattatcatgaaaatgttcctttggctattattgaagctaaagacttgaaacatacatacgatcatggtatgcagcaaggaattgactatgctgaagggttaaaacatgctgaatccttacaagtaccttttgtgtatgctagtaatggagaggcatttcttgaacatgatatgctaacgggtaaagaacgtaagttagcaatgaatgaatttccaactaaagaagaattatgggaacggtttaagcaagaaaagggattaacccctaaacagatcaaagtaattaatgaaccatattattcaacacgtgaatcaagaaagccaaggtattaccaaagaattgcaattaaccggtcagtgaacgcaattgctaatggtcaacgtcgggtaatgttagttatggctactggaactggaaagacttttactgcctttcagatagtttatcggttattacaatctgggattaagaagcgtgtattataccttgctgatcgtaatattctggttgatcaagcaatgacagatgattttagcccgttgctaagtaaagcaactaaagtacgaaatggaaaaatggatagttcttaccaaattcattttgctttatatcaacaattagcaggtcgtgaagaagatgctgggcatgaacctttccgtcaattcaaacgtgatttctttgatttagtagtgattgacgaagcccatcgtggctccgctaaaaaggacagtcagtggagaaaaatattagattactttgatggccctaatgtgacccattttggtatgactgctacacctaaaaatgagaagggtgcatctaatattgattattttggtgaacctatctatacatattccttgaaacagggaattgatgatgggttcttagcaccatatcgagttattcgggtcaactttgatgttgatattaatggcttccggcctactaaaggtgaaaaagacgccaatggccaagtaatagaggatcgtcagtatacatcaaaggactttgatcgtacaatgataattgctgatcggactaagaaagtggctaaatatattagcgattatttgaagaaaaatcatgaacgatttaataaaacaattattttctgcgaagatattgatcacgctgaacgaatgcgaacagctttagtaaatgaaaatgctgacttagtacagcagaatcctaagtatgtcatgaagataactggtgatgataaggttggtaagggtcaattaagtaattttgaagatgttactagtaaataccctgtcctagttactacatctaagttattaactactggggttaatgtaaaaacttgtaagttaatcgttttagaccaaaatattaattcaatgactgaatttaaacagattattggtcgtggtactcggttagatgaagcacatggtaaaacattttttacgattatggactttaagggtgcttcacgtctgtttgctgacccaaagtttgatggtgaacctgaagataccgttatagatgatgatggtcaaggcggagtggactttaacaatgacgataagaagacagataaaaaagaggagtctgatatcggtgataaagttagtgaaggtaggacaaaatacttagtaaataacaaacaggttcaaatcgtcaactctcaggcagaatatttggacgccgatggtaaattaattactacatcattgcgtgactacactaaaaagaacgtgcttggacagtatgctactttggataaatttattgaagagtggcgtaaatctgataacaagcaagagcttttaaatgatatggaaaatcatggtattttctacaaagaaattattagtgatgagaatctaaaagatttagatccgttcgatttactagttcacttggcttataaccaaaagccattaagtaagtcagagcgtgttgctaatgtaaaaaagtctggattattagacaagtatcagggtgaagcaagaaccattcttgaagcgttacttgataagtacaaaaacgatggaattgaagaacttgaaagtcgcaagacgttaagcttaccagagtttgaacagtatggtgggccagttaagattattctgaaagtatttggtggtaaaaaaaactatcaaaatgcagtttcagaaatgaaagagaaaatttacagttaggattaggtggcaatggcgaatacacaatttgtaaaacgaattcaggatattatgcggaacgatccggggatcaatggtgatgcccagcggattgaacagctatcatggatcttgtttctaaaggtctatgatgatcgagaaatgatatgggaattagacgatgatgaatatacatcaattattcctgatgggctacattggcgcgagtgggcacaagataataaggatggacaaagccttacgggtgatgagttactagactttgttaataatcggttattaccttccttaaagaaaattacagttacttctgatactccaattagtaagtcgattgtaaaagatgcttttattgatgctaataattatatgaaaaatgggattcttttacgccaagttatcaacgtggttaatgatgttgactttactgatcctaaggatcgtcatttatttaatgatatttatgaaggtattctaaaagaactccaaagtgctggtaattctggggaattctacacgccacgagctttaactgattttattgctaagacattgcagcctaagttaggtgaacgagttgccgatttggcatgtggtactggcgggttcctagttagcaccttaaatatcctgaataagcaagtaaagacggttgaagatcgtgagaattataaccgcgcagttttcggtatagaaaaaaagggacaaccatatatattagcggttactaaccttttgcttcatgacgttgataatcctgacattatccatggaaattcattagaaaaacgggtcgcagattatactgacaaagataaatttgatgttatcatgatgaatccgccatttggtgggtctgaacttcctgttattaagcagaattttccaactgatttacaaagtagtgaaacggctgatctatttttagccttaatcatgtatcgcttgaaggataatggtcgagttggtgtaatcttgcctgacggattcttattcggtaatgacgatgccaagattaaccttaagaaacggatgttaaatgactttaatttgcataccattattcgcttacctggtagtatctttagtccttatacatcaattgatactaatattctcttctttgacaagactggtccaactaagcaaacctggttctatcgtcttgatatgccagaaggatacaaacatttctcaaaaactcgaccgatgaaattagagcatttcaagccagttgaagaatggtggaataatcgtcatgaaattcaagatgatgccggtaattacaagtccaaggcttatactccacaagaattagctgacaataactataattttgatctgtgtggattcccaacagaaactgaagaagtcttaccaccagaagagttaatgggtaagtataaagaagagcgggcagaactaaatactaagattgatcagacactcagtaagattaaagcattgttagaggaggatgattaaatgactcctgaacaattgcgggcttctattctccaacaggcaatggaaggcaaattggttaaacaagaccccaatgacgaacctgctagtgaattactagaaaaaattaaagcagaaaaagaacaactggttaaagcaaaaaaaattaagaagactaaagccttacctaaaattacggaagacgagaaaccgtttgatattcctgaaaattgggaatgggttagattaggtactgtttttaatttacaagcaggaaagaatagaaaagcttctacaattaatgaaattaaaactgtagattatgattatccttgttttggtggaaatggcataagaggttatgtatcagactttaatagagaaggaaaatatgcattaataggtagacaaggagctttatgtggaaacataaattttgctaagggaaaattttatgctacagaacatgctgtcgttgtagaaatatttgctggtacaaattataaatggagtggatattttttaaaggctctcaatttgaatcaatattcaacagcaacagctcaaccaggcctatctgttactaaaattaaccgtgtattaattccattaccgccattaaaagagcaattgagaatagtagcaaagattgaaaagttaatgccattaattgatgagtacgcaaaagcatataatcgactaaaagcaattgatgatgattttaacgataagatgaagcaatccatcttacaatatgcgatggagggcaagctagttaagcaagatcccgatgatgaaccggctagtgaattgctgaagaaaataaaggatgagaaaaaacaattagttaaagaaaagaagattaagcggagcaaatcattgcctagaatttctgaagatgaaaaattattcgacattcctgaaaattgggaatgggtaagattaactgaagttggatcctggggagcaggtgcaacaccatctcgatcgcatcccgaatattataatggtggaattccttggctaaaaacaggtgatttaaatgatggggttattagctctacttctgagacaatatctcaagcaggtgcagacaattcttctgtaagatttaaccaaccagggaatattcttatagcaatgtatggcgctactattggaaaattaggaatagcaggaatttcgttaactactaatcaagcatgctgtggatgtaagacttttgatggaatatataattggtatctcttttattatttattagcaatgcgacctcttctaattgatcaaggatcagggggagctcagccaaatatttctaaaactaaaattgaaaagtttccttttgcactaccaccatttgaggagcaaaagcgtattgtaactaaaattgaaaaactaatgcctttattggttgagtaataaatctataaggaaaaattaacaggtactgcataaagtctgacgtgtacccttaaagttggaacctgtatgttcttgctttaaaattgaataaatatttttctaggcaactagattctgctcatattgaagtggagtttggttgcctagttttgtctgaatacggcgttcgttgtaaaagtgaatccattcattaattgcttggcttaattcttcttgattgcgataactggtatcaggaccgatttctgctttcagtttactaaagactgtttcacaggcagcgttatccagacaggttgctcgatgcgacatgctttgcctaatgtttccctgacgaagtagtttgcgccaagcacgatgttgatagtgccagccttgatcagtatgtaaagttaattggtatcctgtatgaggtaactgcttaagtaattgctggagtggatctaatgcgaattgaagatttggatgttgactgattgaccaagtgagaagctggttagttgccaagtccttaataatttctaagtacacttttcgcccatcatgagcctttaattctgtaatgtcacaaaccattttctgatatttacggttactcataaaacgccgatttagcttattcttagctttcttgccatttggtcccttagaggaatcatacttacggactcgccgattatatttgatacatttaagtcccatttcatgcattaagcgctgaatgcgcttatgattaggtgtctttttaccaattaagcgatagtagtctcgaatttgagtgcttaaacggcgtacgccgtattcagcttggtagtagttaaagagacctttaataacggctttaagttcttcttcatcctcatccggatgttcaaaccgattttgccaatactgataggttgacatggaaatgggaagtgcatcgatcaaatcctttaataagtatttagccttgaggtcataaattacttgtgcgagttcttttttggatgctttctcaaggctgtcaatttttttgaggcatcgagttgtatctttaacaataagttttctctttgtaaagcttggttctgtttttggagctgaagaagcttgtcttgattcttgtcgtgtcgtttgaccatttttaggtttccttccccgacgcaatctcagtaaagcctgtggcccttgcttgttatagagacattcccactgatacactgaacctggggaacgatatccaaagtgaatacaagtttctgaaattgacgtcaaattttcttgtttccactttacctaaccgaaaatccccagttactttgggtggattgagtaatggtcctttaccaaatcttgcataaattcccacccaaattttgaaatcatgttcagcaatcccgtatttatgcctaactgatgctaaagtaacattaccgttggcatattcttcaacagctttaagtttagttttaacgctaattttggtcatataaaatacccccagagttgatttccaactctgggggtacacgtcagaggattatcctcaaggcctgtttttatattgagagaattctaagacagtagtatattgatattaaaatttaatgagaaagaagatgggagagtagtggctaaggagagaaaagaaacgatctttacgaaggatattgttttagtaatggcggcttcattcttcttcatttttagtaatatgtattgtaatccgctgattaatggctatgctcaggaattaggagcctccagtgctttcgccggaattattgtggggatgatgagtattgttgcgatgtttcttcgtccagttgcgggaaacatgacggatcatttttcaaagtatacgctggcgtttctcggtggtgttttaagctttattggggttatgggttacgttattacccccaatagcggcctgctcctgttctttcgactaattaacgggttagggtatgttctttgtacagtttgcatgacaacctggttatcatatttagtcccgtttaatcatgtcggtgaggcaatgagtttttatggattaatgaatgctttggcgatggcttttgcaccagcggtatcgatcaacctttaccgcgtgatcggttaccgatatgcaatcattatttctgcattagcatcattaatgatgattattactgtgcagtttattgataataaagctaaaccagatcctcaaccgaaaaaagaaaagactaagggcttccatctgaaaattattcagaaggattcgttgccaattgccttcttgactgcattgtttgctattccatactttgcaactcaggcagatattgttacctatacggaacaacgtcatttgccaattgcagttggctcttacttcttaatttatgcggttgttttgttaggaattcggcttttcttgcggaaccaatttgatacggttaagttcggaccatggctgattattagtacaatcgcaacggtcttttatttaattatgttggcagtaatgcatactaactttgaaatggctcttgccgcagcagggatggcctttggatacggattgatttattcagtttgtcagtcaactgcgatgatgttggcaccttctaatgaacggggcctggcaagttcaacattcttcttagggttggatgttgggatgaccctcggacctgttcttggtggggtcattgattcaacaatgccagtaaaatggttctatccagtaatgctagtaattattccatttattttgctaatttatgtattcaatcggcgcaagttaaatagtgcagtacaaaatcattaaataatgtcaaaactgggaaccaactcgagccttgttcttaataagggttcaggttgattcccagcttttttattatcagaattttagtttgttctacatgaaacacatttgatattctagtcaggtttaacgatttcttgtttccagtggtggaggtgttgttttgtgatcacacaaaggccatcttcacctaatgccttcattttatcggtacacataatcttaatatcaggattatcggcaacctgttgttcaccccagtaatttaagtaacggagggcagcataaagtttttccccttcagcggttaaacgatattcaacgtgtggaggaatggtattgaaactcttccggtcaacaattcctgcatcgacaagttctcgtagctgatcgctaagaactttgtgggaagttcctaattgcttcactaattctccggttcggcggggatgaccggcaagaaggtaaagaatgaccggcttccatttaccaccaatgattgatagggcatagtctgcaccggtattaaacattttagccataaaaatcctcccttcagtactttcattatatatgaaaagagtgaagagaggagtagagttattatttaattaacttaaagacttgatcttctggaaggtaatctttatcaccagctggagattcgattgagccaaatggcatttctgcgcgtaacttccatgattcaggaagatcgaatgcttcatgaatagcatcatcaattagcggattgtagtgttgcagactagcgccaaggttgttttctgccaaggcagtccagacagcttgttgagcaccaccaattgcttgctcagaccaatccgcgaagttagcggcatagctagggaattgttcttctaagttatgaacaatatcagtatcggttaagtaaaggattgtcccgaaacctgcacggaatgttgcgatctttgctttagttttggcaaaagcagcaggatcctttacaatcttctggagagtttcttcaacaatatcccaaactttgtcagagttcttgccaaaaagaacaactgcacggacagtttggctgttaaaggcacttggagagttacggactgtttcctttaccaggttaaaaatttcttctgggcttgttgttatgttatcgccaagagcataaatggaacgacgcttggcactgagttcattaaattttgattgcattgtgagttcctccttaatcaattctttgttatttcacttactaatagtaactaaaatatgagacatggacaagatgagaaataaaattcacctagttacaaattcttccctataataagatttgataatggcagattgcaagaaataacttgaacgaatttaatgacgtagattaagcaggaagatctcgattggtgtatgccaattaagacatttaagtggccgtgaattcagataccaattgatttgaaccagttggtaatcacttagttcttcaatggcttgtcccttgggaataaaccgtcgcaaaactcggttacggttctcattactaccgcgttcgtgcggtgaataggcatgggcaaagtaaacctgagtacccgttagctgttcaattgcctgataattagcgaactctttaccatgatctacggtcagcatcttgagtttgtcttgaagttgactagctagttcaagtacggcttgagtcatggactgactgtcgcgaccatggagccgtttaacaattgtcaggcgactcttacgctccacaaaagtagccacagcttgacctttacgcttgccagaaagcacggtgtcagcttcaaagtggccaaattcctggcgagtttcgactttatgaggacgctcctcaatggagcggccgtgactgaacgtaccacgcttttctttagcacgatgacgacgaattccatgatcaggcaaatcgggtaactgtacatcaagccagccttgatcaatccagttatagaccgtcttgtaggcaatcccaactacatgggcaacttgttcaggggaccacttctggacttgaatcttttcctcaatcaagtgcttaaggcttttagtgagcgaagacttccgcccccgttgactaaccttttgttcaaagtcagtttgcgctagctcagcctggtactcactatttagccggtgaagttcgttaatgatggtggtcttactaaagcctaagtagttagcgatgtatcgcaaggaacgtccttcattatgaagcgtttcaatgacaacacggtgctggaatgataaaatagtggtgcccatcaaggtccttctttctaatggaatgttgaggtaacaccattaaagaccttgatgggtttttctgtccacttaaatgttcaacttaaattttacaatctgccatatgcaaaagctactaacacgaaaagggaaataattaaatatggcttaattaaaattgaattaaataaaaatgttgactttctaattttagggtgttaatcttttgataatcaatttaacaaaaagatgttgatcaagaaagattagtaatacttacttaagagagccaatgtttggtgtaaattggtggacagtattataaaaatctatcacttgtgagtcgtatatcgaaacttaagtagaatatactggtaggcgcccattattgtgtcagctaattgttgctttgcaactgttggtgaaggtagttatttcactacgaaaaaaggtggtaccacgtgaaaacgtccttttcaatctcagctttggggttggtaaggctttttttatttaaaatttaaaggtggtggtgtaaatgtcagatagcgacattattaatattaaagaaagtatactaagaaactctattaatcatagaaaggtgtttccttttttgattaatatttaattcattgtttaatttatgacgttatataacgtcttatttaataaaaattggaggacttacctatgaaaaagcttaaagcacaccgtctattttatgtattaactcttctaggaacacttttgcttcttttaaccggatgtggaaagtcaaataaatcatcacttcaacaaattaaagagcggggtactcttagagtgggaatgatctctgctaatccaccatacgaatcacagattcaaaaaaatggcaaaacgcaaatgcagggcgctgatgttctactagtaaagaaaattgccaaaaacttaggtgttaaatatgaattaaagacaatggatttagatggacttttgcctgctttacaagctaagaaagttgatatgttagttacatcaatggctccaacgccagaaagacaaaaagcggctaagtttactgacacgtattacaagagtaccaatgtcttggttgttccaaaagctaatctagctcaatacaaaaatgccaataatttcaagcatgctaccattgctgtagttaacaattcatctcaacaaccaatgattcataaggtattccctaaagctaccactaaggatctatcaaaggttaccgatttagctttagcagtaaataatggaaaagctgatgccttctgtattgacaaaccgactgcaattatccttctgaagaagaatccagaattaactatgacttcatggcgacacaacgatggatcaaaaggtggtgctattgctcttcctaaggggacttcggatgaccttgtaaatcgcttgaatgaagtaattcaccaaaacaaggcacaatatagcaagtgggttgatcaatatgcacagaaaggaaccaactaacaaagattagaaggagtgattttatgttttcaaattactcatttattacagaatattggccattatttatacatggtcttgtaacgacaattgaacttgcagttatctcaattgtcttgggtctactattaggtattaccttggctgtgatgaaaatgtcaaaggcaaacttactaagcttaatagcaaaaacgtacattggcttcattcgtaatactcctttattggttcaaatatatatcgtttatattggccttccacaattactgggattctccgtaaatgactttgtaacaggtatagtggcgctaaccttgtattcaggtgcttatattgcggaaattattcgatctggtatccaatctttaccggtagggcaaacagaggcagcagaaagccttggtattccatcatatcgtattttattggatatcatcttaccacaagcattcaaaaatattcttccagcactgggaaatcaacttatcggtaatgttaaagattcatcattggtatcagtattaggtatcaccgatgttatgtttgccgcccaaacagttcgtggttcaacagccttaggattggaacccatgattattgcttctgctctttacctggtaatttgtctgattctgaatcagattcttgctttgtttgaaaggaggatgcgtcacgatgcttgaattacgtcacgtcacaaaaaagtttggaaataacactgtcttacatgacattaatcttaaagtccataatggagaggttgtagtgatcattggtccttctggatcagggaaaagtacgttgattagacatatgaatctcttggaacagccaactagcggtaaagtacttttccaggataaaattatttcagggagtatttctaaaaaagcccaacaaagggtccacgaaaatattggaatggtctttcaacattttgacttatttcctcattttactgttagacaaaatatttcgtatgctccaagagtggtaaagcatttatcaaaatctcagactgatcgacaatcgacggaattactaaaggaaatggatttagaaaataaggctgatgcctatcctgatcaacttagtggtggacaacagcaaagaattgcaattattcgatctttagcaatgaaccctaaggtaatgctttttgatgaaccgacatctgctttagatcctgaaatggtagaagaagttctgaaatcgatgaaaaagctagctaagagtggcatgaccatggttgttgttacacacgaaatgggatttgcacaggaagttggcagtcgcgtagtttttgtagatagaggtcacattttggaacaaggcacaccagatgagatttttcatcatgcaaagcacgaacgaacaaagaactttatttctaaaattctatatacctagaatagagagtgtatctaattatgttagaaaaaaatattaagacaccattatatgagcaaattgagattgaattaaagcgcttaatcaatgatgataaatataaacaaggtgctttaattgcttctgaatcagaacttggcagagagtttggagctagtcgaatcactattagacgggctattagtgatttggttgatcagggttatctggttaaaaagcagggaaaaggaacttttgtccaagcaaatatggttgaacgtaatttattacatctaggaagctattcaaattttatgaaaaacagtagtaagcatccttctgtacaaatagttaagctacaagaaatagcaagtacagataaaatagcagaattactaaatattttccctggagaaccagttataaatttgaagcgactagttaagtttaataaggaagtaagtggcttagaaagtgcttactattcttcaaataaattcccaaaattaagagaaaaaatcaccccagatatttcaatggctaacctattatctactcaatatggatataaggaacagggtagtaatcagctattgagctatgtaccagctactagtgagttagctcaatatatgaataaggttccgggagaacctctattcaaattacgtcgtcaagtaatggataaggaagttatttatgtgacttttaactattacgacgcatctactaccaactttgccattacatctggaaatcaaagaaaggaatgattctatgagggtcttggccattggcgataatgtaatggacatttatctcgatagtaagagaatgtttcctggtggcaatgcggttaacttcagtgttatggctactcgaataccagaaattactagtgggtatcttggcaattttggcagtgataatttggctggattaatgaaaagtacattaaaaacatttaatgtcaacattgatcattgtagaaatttgaaaggtgaatccggatattcgctggttaaagttgttaatggcgatagaagatttctagctagcaatagaggcggcgttctgaatcaaggaattaagatttcagatgacaaggactatattaatgcaatggatttaattcatttaagtgttaatggtaatggaaaagaaataattaattacattagtaaacctaaaattgtctatgactattccgatttctctaatgagaatgaaataactttgactattgataatgtagatcttgcttgtttctcagtggggaatgtaagtaaagatagagtagttgaacgagcaaggcagcttcaaagaatgggaaattatcatactattctactatttactatgggaaaacaaggggcaatggtttttgcaagaaaccgttgctattaccagccggctcaactgactaatcatatcaaagacaccatgggtgctggagattcttttattacttactttagtacaggcttgctaagagaaaattgggatataagctctattcctaatattttgaaatcagctagtttatttagtgctaagcaattaaaaatagatggatcactaggagtaagttttaatatccctggtttgcaactaaaagaattatgtaaggagaggtaattatggaaaaagaaacaactcgtcaagaagtacaagaattagtaaaaaaaattgttgatactaaagatgttaagtctttagtgtttatgggatgtggagcatcttattcagaattatttggcgcatattattatgcattacaaaactcaaaggaacttggtagttatttgcttgaagcaaacgaatttaattatgatgttcctaattattttggagaaaatacagtagctgtcatagcgtccctaagtggtacaactaaagaaactttaaaagcagtacataatgctaaggaaaaaggcgcaacagttctagcattgacctttgctcctgattcaccactaactaaagagtccgactatgttttacagcataagttttttgaaagttatgccacaaagtcttctaaacagaaggtagctctaacctttgcggttgaattattgcatgcattaggtgaaagtaataattataatgaaatggtacaaggattatcagtagttgatgaggttgccaatgatgcagctgctagtgtggataatgatgcacaaaaatttgcagaaagatataaggacgaagacaaggtatttacattatcatcaggttctaatagaggagtagggtattcaactgctaactttatctttatggaaatgcaatggattacaggagttaatcttgatagtgcagaactatttcatgggccttttgaattagcagtggaagaagcaccattcctactatttatgtcagatggaagaacacgtcatctagactctcgagcactagaattcttgcaacgttttggcactaagtatacggttattgatgctaaagactattggctcgatagtaaaatggatgcttcagttgttgattactttgatccactggtgcttacctcagtaatgagaaagtttgcagagtatctgggaaaagctcgaaaacatccattatcaaagcgtcgctatatgtggaaactagaaaattattaaagtaaaagaagtaccacataatagttagaaaataatctaactattatgtggtactttgctaagttacaaaagaggagatgaattaatctacttagtcaaaaagagaaatgggaaaattgaataaatattttttctaagtggcagattgcaagaaataacttgaacgaatttaatgacgtaaattaagcaggaagatctcgattggtgtatgccaattaagacatttaagtggccgtgaattcagataccaattgatttgaaccagttggtaatcacttagttcttcaatggcttgtcccttgggaataaaccgtcacaaaactcggttacggttctcattactaccgcgttcgtgcggtgaataggcatgggcaacttgttcaggggaccacttctggacttgaatcttttcctcaatcaagtgcttaaggcttttagtgagcgaagacttccgcccccgttgactaaccttttgttcaaagtcagtttgcgctagctcagcctggtactcactatttagccggtgaagttcgttaatgatggtggtcttactaaagcctaagtagttagcgatgtatcgcaaggaacgtccttcactatgaagcgtttcaatgacaacacggttctggaatgataaaatagtggtgcccatcaaggtccttctttctaatggaatgttgaggtaacaccattaaagaccttgatggttttttctgtccacttaaatgttcaacttaaattttacaatctgctattatttgaaaagttaagcaaatcgattctgtaaaagcaatgataatggacttaaaatgcatttttgaaagcttttaaaataattgttgacaaatccactagctagcgataaattaaaatacaattaaataatgattataaaaacacgttgaaaagaagagtagctattagcagatggcaagagagtccccgtttggtgtgagaggatgatttacttatagtgaaaatcactttgagtgccaggatgaaagatagtaatttctggtgggagtagcccattatagctaccgtgtttaatacaaagagtattgaacatttgaggctagtagtgtgaactactggcgaataaaggtggtaacacgcagaagcgtccttagattaagcaattaatctgagggcgcttttttataatcattaaatttagaaaacaaggagttgcgttattatgaaatttacaatcgttggtgctggagcaatgggactccgctttggtgtattattacaagaagctggaaatgaagttgattttgttgaaggctggcaaccacattacgataagatgaaagaacagggtggtgtttacgttactcgggaacaccagaacaaacatttagttcctgtaaatgtatatacccccgaagaatacacagcgacagacgcagactttgtattctttgaattgaaacaaatgcaacttgatgatatgttgcaacgttgtaagcatttctttaaggatcaatatgtcttaacagcaatgaatgggatggggcatgttgaaaagttgttgaaatacttccctaaagaaaaattagttgcggggaccgcattagttgccactattttaactggtcctggtgaagttgaattcgttggtaagccagggatgggaactaccaactgggctaactatactgaaaagcctgatgcaaagactgaagagctgatggctgaattgaagaaagccaacttcaatccttcattaaaagataatttcatgggtactttgatggctaaagtagtctttaactcagttgttaataccttatgtacaatgtttgaaatcacaatgggtgaatatgctaactttgataaggcagatgaactttctcgccaattaattgatgaagcatacgatgtctgtgaacgggctggtgttcaattggttaatacccgagcagaagaattggaaagtgttaactacgtatcaaaagttggcaaccctcaccactacccatcaatgtaccaagacatgagtcataatcgtcctgtcgaagttgactacatcaatggttactttgctaaattaggtcgtaaatataactacgaagctaaaacacatgcttttgttactaaccttgttcacttggctgaagcaacaagagaaaagaactaagactaaaccgttaataatggtagccaagctactgatagcaacgctactaacaagccaaccattgttttgcctactaacggtaaggaaagtggagcagctactcaaggacaatacatcaacgttgttcctaaggatagcgttgcagcacaagcaggcattcaagcacctgcagctccagaaactaccagtgtaacatttggtactaaggaaggtaccatgatgactcgtgaagaatacaaggcacaacaagctaacttgccacaaactggtaacgaaaacagtaaagcggttgttgctttgggcgtcttggctggtatgtttggattaggcttagcaagtaagggtaaaaaagaattttaattagtatatatttgttctgacataatatatccgttattaaagcaatgggacttctgcttgatgttctttcacaggaatcccattgtttttttatttagaaaaaggattacgtttatgttgcaacgtaatccttttgaattattacttattctttttcttgtccttattttccttttcttgctcttcaatgcgtcgcaggaaagtgcgataatcttcatattcgcccgcactaagatgtttcacttgctcgtcaataaggtctctcatataaccacggataaacttgtgccctgataccattactaatgccttaatctcgttctgaacgtcgatgtcgacgccaatgttaccgtgttttttggttattgttttatacattgttattacctctccttattttttaaaattatccttaatctcaattgcgttaagaatattcataaaattgtttttatcagtaggatttaaatgtgctacttctttatcaacaattttgcttaacagctgtttttgagttaccttttggatactagataacgcaattaatttgtttcgtgtgacgttgctaacactaactgaagttgtgtaattttgattcttcttagtcatatttgttttcctcctttactatgttctaataaaaaaattttttgaaataatttttttattctatgaagcttagctaaagtaggagatactaaaaaagctattagcagagactaaacgaaaataagctatgaacgttatttgatatgttcatagcttattttttatgattttattttattgttactatttattttcttgagccttacggttactttccattacatgccaacaataattaattgccttagtatattcaacccctgtacgattgtagatattagtaggtaaatcatatccataataggtgcataggttatctatagtgtcagaagcatccccagcaactctaaagggatcggctaaatcatcgattcttttctttgataagtcaatgccttgtttttctaagaaaaaagtggatgaattgaaggtaattagtttactggccttattaaatattgactgtatctcgttcttgtaattgctaaatggttgctcattataggtttcctcaggcttgatgccatttaagtcagaataccaccaatctacaagcttggtattaaatgtatgattgaataatacattatcgttagtgtccatgatagtaagcctgactatttcatctagagctgcaggtccagtaagatctacccaatatactagttctctattcttcattgcaaatcacctcgactggcatcataactctgtggcgtattaataggctgctttctgttattgatttgccttttaatcctgtaaagagtagattttgaaaggtgaaattttaattgagttgcagcatatgtgtgtgattgcaggtattcgtaagcttgacgataaatgggcgtgataacgcgtttatggcgtcctcctgtattcagcattgattgatacttagccttcttaattgccttagaagcacgtttctggcgcaaataatgtagatagtcaaggtgggctaactgtgatgcaatgatccaatcactgctatcactatcactgcttaaatccatatcgctagattggatgataatacctgtattttccactatgtacatcaaacaacatagttctctaatgttgctatatagacaagttagggtagggactactagtacatctccttcttgtgcgactgttgttagaaatttaaatagctggtatcgctctttattgttttgcctaaagacatcagcaaaacagtgatcgtatggtatacccatacttaataagatttttgcttgatattcaaagccgtcttgtttgatgacgctatcttttagccagcctgaaacatagccatattttgtcatatcatttcactccttatctatttgataagagtaatctaactaaaaaaggctattcaatttcattttgagattgaatagccttttttagttataaataccaataatatggactgatgatgtagtatgttttcatttccttgtttgtgctaaggcagtcttaatatgagaaagtgtcattgaggtgtcaaataatgagtgaaagtaccatacttttaattgaaaaaaattggagaaaagcaagggtgttagtaggtggtatgaggttgtgacagaaatgggtcagatttgggttggatattgacccctatttatggcaccaaggtaatccttactgggagtaagaataaagtggtttattaattgtatttctaaaagaaggtgtcaagtagggaaattgccgtaaaaggttgatttagagggatctataaaggtattgtgtcagaagtgccaattttattctatttttttaagttctaactaagtatcttaataaaataacaattaatttattcattttgatttaaacgatagatattatttaaagatcctaaatgaaaattggcacagatgacacacaaagcacataatccctacttactattgactttacaaccacaaccataaactaacaccaggggtcagcttttacatcaactattttcaatttgtttctttattctttgcaatgttgaaactgaaatgttaaaagccctggccgtatccttataagtatggtttgaaaggtagtcatatgccgcttgatagtgaggtgtaatcaacctttttggacgaccttcatggtagtctctcttatggagtctagcataacgttttccttcttgagttctatccactatcatgtcacgttccatttctgcaacagctaaaagaatagtcttaaccagcttaccaattgtagagttttcaagtatgcctatgttgagtacattaaatttaatgcctttgctcattagtggatcaagtacatttaacgcctctctagtatttctagctaatctatcaagcttggttactgtaatagtatcaccatttcttactttattagttagttcgtcaaacttaggcctgtttgttgttgttccagtaaatttctcagaataaatattacttttgtctatacctatttccattaattgacttacttgatcgttaaggctttgccctttagtcgatactctggcatatccatattcagtcatttctattaatcccttttctgaataaactttatgaccacaggataactccgttgtttagggattggaagtcttgttcaaatactcaaaagttgatgaacaattaacgtcacgtacctactttataaaaaaacgaaaaaaatcaaaaaaaatatatacggtaaaatgtataaaaatccattctatattaataaaaaaacgtgttcaaacaccgttagatgaacacgtttttgaatttatttaaatttcagcaaaagtgcatacttattgcatatataagtaattatataacatattatattcgttgtcaatagtaaaagcaaaaattaatttgatttcaataaaattatgtgttttaataaaaaatgaagcgaaggaaacaaaccatcaaaaaaacgtttccttcacttctgtcaaaatgtaataagtaatcatgacgaaaacttatcttaatttgcaataagaatgtaacgcttcatttaaataccctttatataaaaaacgttctacattcatactattagtatactctaattttcgagaaatagcaaataattaaagataggtcccgtcattgaattacttattaatcaatggagggacatttttatgttatttaataatcatggatatgtaggtcaatcgcgaagtgtaaggtctcaagaagctattgaagagcatgaagtacctttaaatcaaatcacccgtgacttgattaatgaagttattgaagaacttgttgacgaggagacaattgataaggaacaagaaaattggctaaaagccattcccgtatatgtttggaaaaaccaaagcccaaccagctggcatcatacaggtaaatattatcacgaaacctatcattatgatcttccactctatgctgaagaatttatcgatgatcctgaaattgttgatgaaagcgtcaaagagcataaacgagaactatctgaacgtaggcaagcattgcttaacgaatctactgaacctgaatatgaagtatattattattctaaggatatttggggaggaacacgccggcatcctaagattgttgatatcgaacatggatacggtgttgcaaagaaagagagcagtcgtttatatcccgtttcggtaagtgatgaagattggccaaataactcctattattcgataggtggaaattatattactgttaagcaatatagtggatatttagaattagtcgctaagcatcctgaattcaaaggaactaaaaggaaactaaataaagttctcaaagcattaggagtaaccctttaactttaaaacaagaattgtcgaaagttggaggtaataactaatgcctaggcgaaagcatcatcataaaaaagataaagtatttttctttaaaagtacccctcaatttttgaaaatggcagaacttgctcacttgaacaaggaatttaatcacaaaactaatagtaaagagtcaattaagctactgccaccccagatttctgatacagttattaccaatgggggatcccataagagtcagcaggatcgcttaaattttactaataatgggatttatgcatacagtaagtgcttagcccaagacgttgtacaaatagatgttcattcattgctcccaacatgggcctttaacttacggctattggatcataaacataaacaacttttcttgagaaaaaaagaaatcgaagcaacacctaattatatagataataaacgcctggtaaatgaacgaaaaagagataaagacaacctcaaccgcttttgctcagagaatggaaaaacaaagaatgaacagtatgttaatcgactgagatgtacgtatagcggaatgaacatgatatacgatatgcttcaattctggggtttagaaaacgtgattaattgtgttaatgatggatttattatcagaataaatacacgaaactttgataagaagtatcaacaatttcaacagcgttatcaaagaaaggttagtcaattaactttttcaatgaaaaagtggaactatgctttaataaaaaacgatcaagaatacttgttatttaattctttaacagattataaatgtcgaaatcattgttttgatgttggagctaattattatgaaattactggtgaaagtctaagagaagcaaagaaaaataaccatgttaattctttaattttagctaaagcagaaaaacaagaaaaggaggcagtgtatatagtggaaaagcaagtatttgaccaagatccttttaataaagcaacaaaagaaaacatggaacgacttgatgaagtaaaaaagataatgaatgaagctggaattcaggacatcaatcatggtatcttgcaacctcattattataggtttgaacttgataaaaatgatagtcagcagagtaaagaatacataaataaaattacaaagagtatgttgagcaaccaaatttttatgctcgaaaatcccctgctagtactgttaatttattcggtcaagtaataaaggcaactgaaattaatgatatggagcagtatctcagagatcataaagatgtaactgttaatgattttgtgcctccaattattagaccagcaatagtttcaattgatgactggattaagcagttattgaatgacaaagagattaaacataatctctacctatataatagtgtagcaattgtgttgcaagtatgggcaaatgaaaatagccgtgatcctaataccattatcaagaagttaaatgatgcgttagttaaagatagatttagcaatctaagtattgcagataaagtgtataacgatcctgcaactatccttgttgataatcaattaatggcattaaacgagcatcatgtgtacactgcagattctaaagcggtaaatagcattattgacaaatatattgatgcaagcggaaaaaggtttattcgaaactctcgtaataacgtgtacgaactccttaataataataagtataaaaatggcaaattagatatcggatttaaatctgagaatcagacaatctggattgacaataaaggcgtccacacagaaaatccactgcttaagaaggttggcaattacgtaaatgttgattatatcaattatgaagcagataaggatttatttaactcagaagaatatagtcaagttgaagcattcctaactcatataagtgatggctactataggcaaattacatgtatgcttgctctaattgttttacaagaccctaatattgttccaacacttcgcagggctttcatattgtatggagtgcctgggtccgggaaaactgttttagctaaactattatgcaagatttttgatgaaccaaataagccgtcaagaatactatgctctgaaccaaatattaataaagtgtttacggatcctaatcttattgatgctaatgataccaaaaaagggaaattagtattgtggtttgatgattttcagtctgatggtaggtcgaatgaaattaaaaggaatgttggaacggtaataaatgcagtgactagcaatgaggcgaaaacgggagctgcaaaattccaacaatatcacgatattaaactgccttcattgattgtactttcaacaaatgatgtcccacaaataaaacatattgggactgttgataggatttttgtcataaaatcatcaaaaaggttaacagacgaccctaatattagttttagttccaatatagatgcgtggataaataataagaaagttcaagaagcgttcttctgcataatattaaataccgctgttgatatcttaaatatgagcaaagatgaagcaaagtctatttttgacaaaagtaattccgctcaatcagcactatcaaaccttaattcgtctattgaagctttttttgaggaacaaaatattacaagtctttatgatcttgttggaatgcaagcaaagaaactttttgacgtttatttagaaggagaaaaaaattttgcttatgcaaccacttatcgtgctttctgcgatcaaattgagggattaggtttgaatttaagacgaaagcattttaatcataaaaactatcaaaaagttatctgctcgaaaaatgataatttaacgcaagaaaagttgaatttaatgttaaaagaaaatgaactatctcccgatcaagttgaatattgggataatgagattcatcgtcaacgaggaaaggttagttcgtggcattgtggttatgatgaattaaaagagaagtataaaaatgatcagaaattatttatgccatttgaattttgaattaacgattgaaggggatttacgtgaataataaaaagaactttaattggcaacaggctattaatatgaacaaggatatttttttggaatattttgctcaagcaagtggattaagtaaggctaaacgtcaaccaattaacctaatggaagaagaacataggattggtgtttacttttcatccgcagcatatcttgaatggttgaataagattaatgatatgaaacatgaaattatgattttaaagactaaaaagtaggaggaacttattatggaagcaaaagacttaatcggcaacactctaatcaaaaagattacaaattctaagggcaacacttggaaaccagtattgcgtcagcgatgggttggtaaatttaaaggattaaaagaatatagtcgctcatcgctgaaagataattatctaattttagaagtaggcggttactttgatggccttatttttaacccggacccatttattgtagtggatggaaaacgaatttatctgagttacgaaaattctattccaggcttatgtcgaatcgtactagtggatattcgagctttggaactctcaaaaaagtatgattttaatgacaaatatcaaggattcgactctgaacgtgataaatatcatattgctaaattcaagtcctttgacgaaatgaaaaagattgcgaagaaacaatactcaattaataatgagttgccgacgtatgatattaagatggtctgggaacaggataaaactagtgagacatatggtacacggcattattccgtcacgacaaatgtaggactttctgaagaactagatgaagaacttttgaaagcataatattcattcagaattgcaatgtgcagagttataatccaatccataaggaggccattattcatgtttggcaaagaaattttaaacggaaagcagctgtgtgaaaaactaggcgtaagtaccacaatcttgtatgaattattagataatggactaccatttcatcaattaacaacggcaagtcgaaaatactataacctatcagaagtcgaaaattggctgctaaatgcaggatatcgtcagaaaacgatttggacaaagtaactatagataataatgatgggggtcatgctttgtgctgaccccattttttgaaggtgaaaaaatgattaagaaaatgacaactggtaagcacaaaggagagtaccaagtgcgcatccagccgattaataagattactggtaaaagggaaagctggccagtagattacgcttctaatcgtaaaactgctaagtcattagaaagacagatgtgggcagattatgaggaagggttgcaattagctgacggcagtgcgatctttgcagatgaatttcaaaaatatattgatgaacgaaagaatacgatatcacctgttacttaccgtgactggcaaaattcagcaacggaatttaagaaatattttaaaaagactaagataaaaaatattactgaacgattggttgagcagttcgctcacgactttattaaacaacataaggctactgtaggacgtgctactgtaattgatcatcgcctgacccatatgcgaagtttttttaaggaattggaaggtaaggtagtaaagaaaaatccagtacccgagcaatatttggacaagttttttcgcaaaaacgaattcagtgttggtaagcaacgatacttattcacaagcactgaacttaaggctattaaggctcaaatacaaacggagttaaacaatactacaattgctaattggggcacccgtttagcgatttggattgatttggaaaccgggatgcgtccaggtgaaattcaagccttaaaatttaaaaatattaccacggaagatggatattctacctttaaaattaatgatagttggtcagactatgcgcgtaaattcaatgggacacttaaagcacgcccaaagggatactcacgatattgtttacctatctctcaagaattagtggatttccttgtcacataccagcaaagacaaaaagaatttctaaagtatcatgatttaacgaatcctgaggggttgctctttctcaacctacacgattataggaagtgtgtaaataatattcccatcactcagaagagcatgaacgaaatgttaaagaaaatttgtaataaattaggtattcatagtgatggatcacaattatctatgtattcttttcgacatacattatgtacaaagttagcgaataaaccaggaatttcatatccatgggcatctgagcgaatgggtaatagtctttcaatttttatgcgtgtgtacgttaaaacagatcgtgacatcgatcgaaagatgatggataattggatgaaataaaaagcaattagtaattgaacgtgaaaaaaatatctattttttcggtgcaacaaatgaattatcggtgcaaaaacagtcaattttgcaccgataatttttaaattgcactgataaattggagagattgggttaaaataataaagaataattttgataagaaaggagatgaaggaattgaaagtttttaactaccagactttaaatgatttaagattaactactaagatggttgaaaaactcaatcaaatctatgagttaaaagggaaaacagcccatgtatccttaaaatcaaaagatattatggataaattattagcggtagcaaaaattgaaagtacagacgcatcaaaccgaattgaaggtattgccacaagtgatgcacgactaaaaaaacttgtaagccaaaaaactactcctgaaaatagaagcgaggaagaaatttcaggttatcgcgatgttttagcaaccattcatgagaattttcaatacattaaaattacacctaacaacattctagcgctccataaggaactgtttaattttactgaaagtacgtggggcggtgaatttaaaaatattgataattctattgtgactacatttgcggatggtcatcaggagacgagattcactccaccaccggcttacttaactcctgaactagtccaagacttatgcacggcttacaataatgcaattaccaataattcttttcctcctttaatattagcagctgcctttatgcttgattttgtttctattcacccatttagagatggaaatggacggatgtcacggctattaatgttgttagaattacatcaattgggttttgaagtcggaaaatatattagtttagagcgcttgattgaaaaaacaaaagctgaatattatcgaactttattagaaagttcaggaactgcttggagtaataatgataatcattatggcccctatgttgattactttttgagcatcgttcttcaagcatatcgtgaactaaatacacgtattgatttcactaatgatactgaaaaagatccagaatcattagtgcttactaagttacgtaatagtttaaaacctttatcaaggcgtgaactgatgaacttaattccacagtatggtgagagtactattaagcacgtattagcagaattacgaaagaagaacataataaaactggttggtagagggagagcaagtcgatatacagttaatgactaatcggtgcaatttaaaagttatcggtgcaaaattggctggctttgcaccgataaaatgattattgcactgaaaaatgcacacaactagacacataaagtcaaaaataattggcttaatcgttgatatctcaatggttggagcaatttaacctccaagcttctagtcagcactagaaacatactaaaagcctataacaatacgtttttaccgtatttgttataggctttttatgttagtttaaggctatgatttctcacttttttcacatgttttgaactaaatgatatcctataatttttatgatcacgaaaatggttgatatgatagtatttgtagtcatttaaacgtgtgaaaaaatgtgaaatgccagaagaaggtattgtaagcaattatacttcttcttcccaacaatgcgtccagaaaaggaaactaaagatagcaagaagggcaagaagaaaaataagaagtagcctaaaaacttgctatgacggcttttaagcgacttcgtggatttaggctaaatcagttattagcttctaaaaagttagtaactgtggtgtgtgtacaccaaaaatacaccaaatttaaataaattaagttggtaaaaagctggcataaaaaatgaagggctacgattctctatttgggaatcgtagtcttttgtttaaagctataattgaagccttaaagtaatcagtaatatttgatgagaggtcaaataacccttgttttagcttactttattggttgaacgataaaatctgttactccattaaaaaagacctgttagggcacgacaaggcgaattacaagggctgcgctaatagatgcgaaaatgaaagcataagataatggcattttggcaatcttaagcctaagccaactcagcaaaagtaacacgtttgtttgccacggtgaaagcattcaatgtaaaaactgggtgtttttttattgagcagttaacgtttataggatatgaacaatgtcaatagtattattaaattcctattattttgtataattagtatagtaattatacaaaggaaaggaacggatttgtaatatatggctcggcttgatcagaaatctatagaacaattaggaattaataaagtagaggatgcactctggaacgttagagactgggctgatttcttttttagtgaaaatgataagactccgctgttagatggcaatatattaatttatagtaggcagattgcaagaaataaattgaacgatttattgacgtagattaagtaaaaagatctcaataggtgaatgccagttgagccacttaagtggccgagaatttaaataccagttaatttgtgttagttcgctgttactcaactcttcaattggctttcccttgggtataaagcgtcgtaggacccgattacggttttcgttactaccacgttgatgtggtgagtaggcgtgggcaaaatataccggtgtaccggttaatttctcgattgtgtgaaagtccgcaaattcttttccatgatcaacggtcagcgttttgagcttgccattaagttgatgagctagctcgacaattgcctgcttcattgattgactatcacgaccattaaggcgtttaacgatggtcagacgactctttcgttctacgaaggtggcgactgcttggcctttgcgcttgccagagagaaccgtatcagcctcaaaatgaccaaactcctggcgggtatcaacactagcgggccgttcttctatggagcgcccgtggctaaaggtaccacgcttttctttggctcgatgtctacggataccatgatctggtaagtccttgagctggaggtcaagtaatccttggtcaatccaattgtagattgacttataggcaattccaaccacatgcgcgacctgttcagctgaccatttctggaccttaattttctcttcaatcagttgtttgagattagtagttagagaagatttgcgtcctcgttgagtaaccttcttttcgaagtcagcttgggctaatcgagcttgataagcaacatctaaacgatggagctcattgaagatagtggtcttactaaagcctaagtagttagcgatatactgcaaggaacgtttctcgttatgaagtgtttcgatgacaacgcggtctgaaaatgataagatagtggtgcccataaaggtccttctttcaatggaatgttgtggtaacaccattaaagacctttatgggtttttctgtccacttaaatgttcaacttaaattttacaatctgccactactaaatgtgtactatataaacacgtatttctgatgtaaaaatgttactccagtaagttaaaaacagctattaagttatctaacctttaaataaaagggttgataaccatggactaagacgacagcagggtatcacgcaggaacagcttgctgagatgagtgacttatcacttaattttgtttcaaaaatcgaaagaaaacagaaacagaacattatcattaaaacattgatggctcttgcatcagccttaaatgttaaaccttcagatttgcttaagggtagcaagggcccagccagtaatcgtcgtaagcatgtggatctgcttagtaggcagctatataagttacctgaaggtgaataaaaagcttcctatcgggacttactgttcaacccagcattaaacttaatgcactcttttaacttcattaccccgctccttttaatattctcgttcaaatatttaatcgcaccattaagatactcccgtttaattaccgttttaagatattccaagcgaaatatttaaaaatattttcgcgtaaatatcatttaatcattgcgtttaaatttcatttaccaactgcgcttttcccgtttcaacttcaaaattaagttcaaaactttcccaattccgatctttgacacacgacatatttacagatatgcgcaaaagtttgtcaaaaacaaataaataactttaattaagcttgatatttcgccattatcgcgcagctaaacgcttatcatttttagcgcttcgtgattgcacatatttttagatatgtcgtatctcaattgccagattagaaaaaaacgcttgttaattttgttggcgggtcgctcggttacaaaggtaatcacacccacccataaaacgagtgctttgttctacggctataagccggtatgtacagctaacgcctcaaggcactgacttgtcttgttgttgacttgaccgctttacgaaattaggcagcctcgcgcccgctgaatctcgagccttagctgcctaatcgttgacatcattcaattttttcttgtttaatcaatgtggataaaaaggccgatcaatatgaaaagataatcaacggtctaaaaagtcgtcgtgcaattaaagaaaagcatcttcgggctgatagtaagcaactcgagcaattgagcaaacagattcgttattactcagcccgtcgggccaacttgctgacggaacggtatcgccaaattgctcggcagttgtttgctgagtatgagctaattgccattgaaaaactcgatgccaaagaaatgcgcaagaagaatcagaaagggtcaggggccactaatcggggtaagaaccgtaagctggcgaaaatcaagccttacgaaattgcgttgcttttagagcaaatggccgatcgtgaaggcaaaaccctgctgaaagttgatagttataagaccagtcaagttgaatttggcacacaataccaaaaagtggtgagcgtcaatgggtgtctaagcacactggaaaattgattgatcgtgatttgaacgctagtcgtaatattttaacttgggcccttgatcctaagaagcatattaagtatctcgaacgtcaagcagcaatcaaagctgctaaaaaagctggaatcactaaagacaagttgccaaaagcgattccagccagagtattagttacaacgaattaattaacgggcgggacagaacctcgccgtccgtccccaaaggttttgagagttactgttggcgtatcaccctgagcgtgcaaaacgggtgcgaaacagtaattaagatcaacttgatctcaacggcgcaagccgttgcattgcctaaacgttttctgagattgagcggctcttagcagccttttgatccagaagcgcggtcatttatgactgagtagttcacgccagcgaagttagcacggtgatcatgctatggattaaagggggaatggcagaatccagtgccgaattagcccaaatgttagcagtcattcgtgatcatcccctcaaagaaattgtcggcccggcccatgaataaatcccagaaaaccaaaaattaccgccaacaaggacggtgatcggcataagagagaaagagaattgattagaaggtaaatacttaataccttgtgactatatgttagcgtttacacatggatttgtcaataacttccccgattttatttaaaacggtttcattccttggcttcttgacttgcgcgcctggttatgacctagcgtaggcgaaagggcttgatcagggtccgcagtggggtgtggtccagcccccagactactacgtagcccagcaccaggccggcccagttggtaatcacatcgtcaatatcgaccacccgcaacgtgtgaaccaaccagtccgaagcaaactgggcgctttcaatcaccagccccggcacgagcccggccaaagcaacctgccaccacgaccagtgcggccgccaaaggtagcagtacacccccagtggcccggtcagcaaaatattggccaaaaattccgggtcgacgtggacgaacgggtggaggttatacggcaccatgtaaaaatacgacagggccttgtaagaatctggcaggatcagcccgaccggggcaaagaccagccaggccaccaccattaagtagcccaggctggtaaagactgtcacccgctgggccggcgtccggtttggtaccgccagtagccggtaataccccgctagcaaaatcagccaagccaccccaaacgtcaaccaccgtgtctgcaacatcaaattgccctcttctataaatagttctagcttaccgaacgcaaccggacctgaccaccgttgatccccaagcttaaccagaacttaatttcccagcatttcccgggcggtcgccaccaggggaccaaattcggcggcaaaggagctttcctttaagtagatcaaattcaagggatgctcgagcggaaagccggccagcggcaattcaaacaaatcgccccgggccaattcgttggccaccagggcccggtacataaagctgatcccgaccccctgcttaagtaattcaatgatcgccgtcgggctgcttaaggctaaggtctggcgaaaatcactcagctgggcgttgtgcgccgccagccaggtcgtcaaaatctcgcgggtccccgagccggcttcgcggacgatcaaaagctggtcaaacaaggctggcaatgtcgctggcgcctcggcctgggcggtcacgccgataaagggcgcactgcccaacggggcggcggcaaagtcctgccgcgaataattaccctcgatcaaggccgcatctaattgaccggcgagcagctgctgggacaggacagcggtattttcaatcgtcacttccagctggtagccggccgcgatcaccttggccagcagctgcggcagtaaaaaggcccccagcgagcgggtcgcccccaagcgcaacggcggggtctgggccaagcggagccgctttaagaccgcctgattgtcctgcccgagccgtttagcgtaggccactagttccgtggccgccggcgttagcttgacccggcgcccgtggtggaccaacagcgggacatctagatcggcctccaggctggccagctgctgggagacggccggctgggtgataaagagctgctgagcggcggcggtcaacgagccggtctgcgccaccaccattaaggtcgtcaaccggtggtccagtaaattttccatcgccctgcccctttcataaggaaaactaacttacaagaaagaaatcataatttttatttatcagtctagcatggtacattaagaatgtaaaaaaatccggatgtcaattcggaaaggagaaagtgaaatgctcaagaagatatttagctggccctttgcttgcgccgcgctcttaaccttaatttgttcgctggccggcagctacctggccaccctcccctacctcaaggtgattggtgccttagtgatcgccctcttgttagggatggtgatgcaagttggtcgcccggtcctggattacagccggccgggaattggcctgattgccaacaagttcctgcgtctcggaatcatcctgctgggctttaagctcaatttgattgccctggcccaagccgggatcaagacgattgccctggccgtcgtggtcgtgaccttcacgattttagtcacctaccagctcgcccgccgcttcggggtcgaccgccacttagcgatcctgaccgccagcgggaccgggatctgcggggccgccgctgtgatggggatttcatcgcaattaaccagcgatgacgatccagccaccaagttgcgccaccaggaaaatgaggtggttgccgtagcgatcgtggcgatcctcgggacactctttaccctgatcgaaatcgggctcaagccactcttgcacatgaccgccctgcaatttggggtgatgaccgggggcagcctgcacgaaatcgcccacgccgtcgccgctgggagcgccgggggcccggtcagccttgatacggcgatcatcaccaagctttcgcgggtcctgctcttggccccagtcgcgatcttagtcgggatctggtaccaaaaggcgacccggcaagccaacccgaccggtgaaaagcagccggtgccgattccgtggttcatgctcggctttatcctggccagcgtggccggcacctttatcccgggcctggccgcgttggtaccaagtctggtcaaattagcctacctgctcctagggatggcaatggccgccttggggatgaacgtgaacttctccgtgctcttcacccgcggcaagaacgccctcgtggccgccggaatttcttcggtgttgctcttgatcctggtcgcaactttgtccaagaccttcttttaatccgtaattaaacgctaaaaccgccgtcttccaactcccggaaggcggcggttttgtttaaatcatgcgtcattatctgacttcaactccgtaaattgagcatctaatttagcaataatttgagcgcgtaacgtttcgatccgtttggctactgattcccacataaatttaccattagatcctgatttttgtatgtacctcgaagaagatgatgaaacaaggtacagagctgagtcttataatttaggtcaattcaggctaagtatgtcctggaataaattgatacttaaatataggaacagaactattgatgagttacttgttgtattcatggatagtgctactttcatgacagtcactcctagcctaggttccataagtcccatgtctaacagtgatatgctcacattccaatattacctagctgattcgctagatttcgccgttgaaaaactaatactaaatatgaagagatcatcaattactcctaattataatcaacaatcaaaactactaaaaagaattattatttttaagaattataatcagctaaagcaaattaaatcagttttgcagaagcaggatgaatacatcaagggaaaatgcgctcctacaaaagaacaattagaattatgtagaggcgcactttcaatggatttcggaaaggatacccctgaaatgaatcaagggcatatcgaagttatgtgtgaagaagcaaacgtcagtcaattcataaataattatttacaatcagagatcattaacaataaacgttctcgttgattatcgtacaataccccttagggttgacggcactttaaataataaaagcgctgatcctaaggggtattgtacgactgacgaacagaggtaatttttactaagcgacgatcggttgttatcttttagagttattcacgtttaatgtagtttgaaaatgttttctttataacccggtttgtaaaattaagttagaaaaacaaaaaagccatttgtgatagacttttgagtatccctaatcaaaagaaaggcaatcataaatgacctacaaacatcttaccacacgtgaatcaactctcatagctgaattttatcgtcaagacactcgagcttatcaagttgctaaatcactaaggcgtagtgctgaaacaatttatcgagtttatcgttacttggatacgggcaagacaattgcgcagtatttaaagcagtaccaacggaataagcgccgttgtggtcgtaaaccaatgacgttacctgatgatgaagtaagttacattaccaagcaagttagtcaaggttggacaccagataccattattggtcggtcagagaagaaaatcagttgtagtatgcggacactttatcgcatgtttgcccgtggtcaatatgactttgatgttaagcagttaccaatgaaaggtaatcgtcatccaaatggctacgttgaacgacgtgggaaagctggccatcttggtcgcagtatttaccaacgttaccgcgattttccgcattaccaacatgaatttggtcatttagaagctgatacagttcaagggaaagctcaccatggcgctgtgatgaccctagtagaacgaatctcaaaagttgagattgtcttgaatgtccatcacaaaacggtcgaaagtgtgaactattatttggatcagtggctatcaaaacagcctcgtcatctttttaagtccattacctttgacaacggtaaggaatttgcgggctggcgtgagattgccaataagcatgatatccatacatactttgcggaagtcggtgcgcctaatcagcaagggttaaacgaaaacaccaacggtattcttcgtcgtgatggtctgagtaaaaagaaagacttccgtaattgctagggcttcttttagtaatgaccaattaccaacaaggttacattctgctttatccataaatttgcgggaatacccccacttctataagtaggggatgaatcgctctcttaaagcacgttagtgctttttcttttgttctatgatatatttagtatatatctataaaatgtggtgataacaatagaattagatataaatcagcattcagtatacttacttaattaccatttggtaatggtggttaagtatcgtcgaaaagtaattaacgatgaaatatctgaatatcttaaacatcgttttgtagttgtgggacaagcatacggcattaatttgcaagaatggaatcatgatcaggatcacgtacatgttttgtttagagcaacgcctcatacggaaatggctaaatttttaaatgcttacaaatcgtctagctccagaatggtcaaaaaacaatttccagaaatcaagcaatatctttggaaatcagccttttggacacaaagctattgcttaattagcactggtggagcgcctttagaagttgtaaaacgatatattgaaagtcaagggagaaaataatggttctaaaagctgttaaaatgcgcatctatccaaattcagcacaacgaaatcagctctggcaaaccttcggttgtgttcgttttgtatggaatcaaatgcttaatatgcaaattgaacggcgcaagaataatccggaagctaaatttgtgaatgcctttgggatgaataatctgttgaaacaacttaaggttgagtatccttggttgaaacaagcagaatcaactgctttgcaaagtgctaatcgcaatttagccgatgcttttcaacgcttttttaaaggtcaaaataagttccctcgatttaaatccagaaaatattctcagagctacaattcaaagtacgttaatggcaatattaaagttttagattgccatcatataaagttaccaaaactcggtatcgtctattttagagctggtcgattgccaatgggtaaaattaagaatgtcactgttcgtctgaacgttgctggtcaatattacattactgttttagtggaaagcgaaaaccaaactcttcctaaaacaagtaaatatattggtggcgatttaggacttaagtcgttacttaatctttcagatggatgcaaggaaccgatcaatcattttgaagacaaataccataaaaagttgtatcgttgggagaaattacgtagtcgtcggttcttaaaggctcagcaggaaatcgcctgggatcatcataataaagtgttagttccacggcaattagatgattttaagaattatcagaaagctcgtattatggtggcgaagtatcggcaaaagattgccaaccaacggttggatcagctacaaaaattcactactaaattggtcaaaaagtacgacatcattgtgttggaaaaacttaatactaagggaatgatgaagaatcaccatttagctagagcaatcgctaacgctagctggtcaaaattagtagatatgttgcaatataagtgtaactggtacggtaaaaagcttattcaggtcaatccgtcgtatactagccaaatttgtgctaattgtgggaagaataatcatcggttaggattgaataaatcggaatggttagcggtacgtgagtgggattgtccaaactgtggtaaacatttagatcgtgatattaacgctgcacaagtcatcttgcaaaaaggattagctatccgatagataaagttaggctcgggacgagccttggctaatagtcgtaacctctgcttgaaggttcgttcagaatcggtagggtaagtatgcgatgtttccagaatctcccacttcaagcattaaaccgtaggtttagctaagtgggagtagttcaagaaaattgcaataatgggcttgataagattacattaactggtgaagttcaagatatttttaaggattaatagttatttccctcatcgactacaagttagcgatgggggattttttaatttagggaaaaggctaattcaatctggagtggtgatttgtgataatcaattatagtaggtcgtttgaaaaacagagaggtgaaggttagtggaacaactctatgaccagtttcaacgaaaaattgattatttacgattatcaataacagaccggtgtaatttacggtgtgtttactgtatgccagaagaaggattgaagttcttccctaaagataaaattatgtcccaagatgaaattattcagttagtgcaaaatttcgccaaaatggggattacaaaagtccgcctaactggtggcgaaccattattacggcgggacttacccgagattatccagcgtattcggcaaatttctgaaattaacgacatttcaattacgacgaacgggacggccttgaagtatcaagcaaagaaattgaaggaagcgggtcttgatcgccttaatatttctcttgatacttttaatccagcagtatataaaaagatgacccgtggcggaaatattaagcatgtcctgcaagggatcgcggcagctgaacgagagggctttaagattattaaggtcaacaccgtagtcgtgcggggcgaaaatgaccaggaagtcatggattttattaattatacgaaagaccacccgatcaatgtgcgctttattgaatacatgccaatcggacaagagattagcgattggaaaaaagaatatgttccgctaaccagcatttttgataagtgtcgcgaggcggggttaacatatgaaccgttatcattgcccggtaatggtcctgccgataactatcagattaagggttaccgaggtagcttcggtttgattcacccaatttcagagcggttttgtgaatcttgtgaccgtttgcgaattacctccgatggttacgtcaaagcctgcttatattggaatgaagaactggatatccgaccggtcatcaatgactttgcggcatttaagaaagtagtgcagaaggcgctaaataataagccgttaaatcatgaaatggcaatgaaaaatgttcatcagattattaatccagcgccaacgtggcggcatatgagtcagataggtgggtaaaaatggcagctgatcaaaatactggcgctcctttttcgccgacggaaaaccgggtaatggatgctctgcagtcggtaattgacccagaattaggggtagatattgttaacttagggttgatttatgatgttcaagttgatgaccaacaattatgcgtgattaccatgacgctaacgacaatggggtgtccggttagtaacgtcttgagtcaacaaataattgaacaagctttggcaactgacggggtagcaaaatgtaagattaacttggtctgggaaccagtgtggaatccaagcatgatgactcgctatgctaagattgccctgggaattcatgaataagtaaaaatatggcgtgcagctttcgtgattgaaaactggacgccatattattatttagattgttggtcaaagatgaagtggccgcttttaccaccgtctttttcaacgagatgaacatcactaatgactattccccggtccattgctttgcacatatcatagatggtgaggagggcgatttgcacgacaaggagggcttcaatctcaacgccggtgacgtgcttggtcttaacggttgcctctgcagtaatactatcctgaccgttattgtggaagtggatatcgacaccggtgagggggatgaggtggcacatggggatcatttcagaagtccgtttagcggccatgattcctgccacttgggcgacagcgaggacatcgcccttttttatttggccatcttcaattcgttgcagggtggttgcttgcatatggatttgtccttgagccgtagcggtacggaaggtaacctttttagcggtaacatcgaccatgcgggctcggtcctggtcattgaaatgtgttagtttgtctgtcatgataaaaccccttttaattggtagattaactttaggatagcataatcgataagcaaaattattcagtgattttaccaaaataaaaatgacatcgcctcaacaatgtcattataaaaataattattcgtttcttagtgaagttacttcaacatcgttatcgtagtttggactccaccaaccttgcttattaatgtatccggatggtaagcaccagattacaaattcaataacatcaactacaaaggaaattgcttgtaagacattactatcaccactagctaaaataacggcaattagccagaagacaagcactccccaaccactgatgccagcgtcaatcttcaatattaacggaatacttttattaccttaagaaaagcttaacaatttagatataaataaaattataaaacccaaaatgtcaatttaagttagaaagaaaatagttgctcatcagtgacgtaagacatgaatacttcatatggagttcgatagcctagcgatttacagggcaggttatttcgcttactcatcagttaggttaccaattcatcaggaagattgcggaaatctagctgtttcgttaagccatcccggcgtaaaagaccgttgttgttttcgttcagccctcgttgattgggagcaccaacctcggcaaagtaagtgtgaaggtcaaattgattggcaatctcgcgccagccggcgaattcttttccgttgtcaaaggtaatcgatttgaagaagtgccgcgggaatttccgaagccactgacttaagtgttggttaatcgcatcagccgtcttttcgtgcacattgagtacaatttcgaccttcgattggcgttcggtcagggtcattgccgccccttggtgctttttgccttggacggtatcagcttcaaggtgcccaaattcagtggcatagtgcggaaagtccttggcacgctcgtgaatacttcgcccaattggccagccttcccgcggcgctcgacatagccattcgggtgccgcttacctcgcatcggcaaggaacggacatcgaagccgaactggccacgtttaaacatccggtaaagagttcgcaggttacaactaattgggcgctcagcgcgcccaataatggtatcaggcgtccacccctgggcaattttgtcgttgatataagtgagttcagccagtgacaactgagtacgttttcggccacaacgttgcttattgcgcatatagtgatcttgataatcagcaattgaggcaccggtttccaggtaacgataaacgcgataaacggtttcggcacaacggttgatcatttgggccactcggtacgctttaagcttttgcacgaaagaatgggcgatgattgtcagctcgtttgtggtaagatgggtgtaagtcatttgtggtttcctttcttttgtttaggggtattcaaaagtctaccacaaatggcttttctatttttctaacttaattttacaaacggcgatcttgtttagaggaattagtgagaaaacctactgactatagataaaaatttatgtccccgttaaaaaatgatgtaaaaattcggggcaagtcataaataatgatataaagccactagtaacacatattaaatgatactagtggctttattatttacattggttgtccagttgagatttcaaagccggctgttacaggaattacttctcccgtgattgcactagcagctgggctagccacaaaataaattgcagcggcgacttcttcgggttcaacaatccgatttaatggactgttttttgcgaatttttgtttatcttggtgaaaaagcggggtattagtcggaccgggtgcaacaacatttacgcgaatattatttttaccgtaatcaattgccattgcccgagtcatgttaataatcgctcccttggcggcattataagcaaccattgctcgatcaccagccattcctgagacagaggaaatattaacgatactaccatgatcttgttcaatcattgttggcaagaaggctttgctaacgaggaaagttcccttaacatcaacatcaaagattttatcccaatcttcttcactggtttcatgaacctcgccgtgaataacgattcctgcattattgataatcgcatcaacggttttaaatttattgagggttatttgcttagcatgttcaacctcacttgatttactaatatcggcttgaataaaagcaatttgtgccggggaatacgtttcgcctaattgtcgttcaacttgcatccccttttcggtatcacgaccgataagtaccgtattccatccatttttaagaaaaatatcagcagtggcaagaccaatcccagaggttccaccactaataacaactgtctgcatatataaaactcctctctaagcttttctctaattatggcatttttggtcagatttagctatttattagaaaagtccttataataaaataaggataaggagggaatataatgaatacagcaaccttagaagcacttcaaaattggcttcatggacgtggctatacattagaacaagtagacgcacaactaattcttaaatatcatggacaagaacgagcagtcattacgccacctgatcgctatcaagtgaaagaccttgacctgaattttaatgactgggttgaattcaataagtgcattcgcaatattcgccattctttagctagtaacgaatagaaagccttttctttggcaagaatacctcctcgtgatagagttattcatgaagggaatatagtccaaggagggatagtcatgataagagttggaataattggtgcttctggaatggcaggcagtgcaatctataaattagcatcgacaaaaaagatttgaatgtaactggaattgttcgaaatgagagtaaggccagaaagatccttggtgatgatgccaatttgatcagtggtgatatttttgccttaagtgataatttgttgtcgcggtttgatgtaattgttgatgcatatggtactagtccagagaatgcggatcggcaagtaagactggctgagaaattagtagttttagcccgaaaacataaaatccgtttaattttcatcctcggtgccggaagccttaaaactggtaaggataagcatctatttgttgatgatattgaaaagatgcctggtgctgagacatggattaatacaccccgccagcagttaaaagaattacagtatcttgaaactatttctgatattgactggctaggaatttcaccatcggcagtatttgaagctggggttgcgactaattatattcttggtcaggatgaattattatttaatgaacaaaatgaatcaaaggtaactgcaggaacaatggcaaagttagtggtcaatgaaattttagcaccacgccaccatcgtgaacgaattaccgttgttgatgcagaatagttattggaactataaaaggcatgagaacgcaaatcaattctcatgccttttaatattagtcaactaattttccaataattggaagttttgaaaccggtgaacactttttggctgcttgttgataggtgacatctgataaatcatggccgaaaacattaccgtggatttctgcgcctttccattctggaacttcagaaacatcataaacatttccacgcaccccgatatatactggacgaccttcttgcccgttatattgcgctaattcattgtgagtaaatgaccgcataataatccctcccataaagaagctgggaattgactcggcctcttcctgtatgagtgtaatgagatatgaaaatagatgacaagtttattcgttatcctatcaccactataacacgaaaatggtaatgacatcggaaattcaatttattcagttgctaagtttgcagcagggcttttgactgagactttcacgagcattcctgcaatgatagttaggatcgtaacgaggaatgggaaaaatgcccaaggaatgaaacttaatggattgatttgtaaggtactagcgatgaataccccagaaacactccatgggacaattgcgttgactgcggctcctgcatcattgagaatccgggttaaatcaacccgctttaagcctaatttgtcaaatgatgggagaaatgattgtccgggaagaataattgcaaggtagtgttccccaacaaggaggttaaccccaatacaagtaagagctgtggagaatgttaaccgaccaggtgtctttacaatcccagttaagtgattgatgatagcgctaataatattgaacttgatcaataagccacctaaagcaagcgcgaagataattaaggctagagaagtaagcatactagagataccgcctttagaaagcaatgtatcgattgttttatcaccggtatgggagacgtaaccagtcatgatggtattagtaatcgtagtgaggctggttttaggtgcatgaatccagccaagtacgaccgcgaagagtgagcccagaccaagggaagggatagcaggaacttggaaaatggctaatacgattaagagcagaactgggagaagagcccatccagagatccagaacccactttgtagcccggccatcatttggtgaacggcgcctaaactaacatttttggagtttaaccctaagaaagtgtaaagaataagacaaattgcccaggcaggaatatcggtggtgagcagggatttaatatgcttgtagatactaatttcaccaacactggcggcaaggtttgttgttcctgaaagcggggaaatattcgaaccacaaaaggcccctgaaacaattacccccgcagttaaaccggggttaattttaagagttgcgccaatgccaataaaggcgattcccattgttgatacagtagtaaatgaacttccacaagcaaccccaacaagggtacaaacaataaaaactgttggtaagaagaactttacagaaataatctcaaacccaaagtacataattgttggaatagttcctgagaaaatccaggtggcaattaagacgccgatagaaagaaagataatgagagggtcaacaccggctcgcaaaccatgacgcattccccccatcacggtatcccatttaaatccacgaattcgcccgtaaacagcaagcaaaacaaatgaaataaataatggggcttgtggttcttggtgcttaaaaataatagggtagcctaagatgcataaaataacgccaagaataagtaaactttcactaaaaccaatcactggctcaggactattttttgatttgttaatagttttcattgtgtaattctccttattttttaataaaaaaataccaactagatcagcggcatttacttaatctagttggtattacggtagtataaaaactcgcggaaaactacacgcccttactagatcaatgtacctagcaaaggactcattaaaacaaccctgcttaggtacgaacaccgctgtccgtacctaaatgagtacagacaattatgcacggtaagcatagttgttataatacttggttgaagttaatgagtgttgaatcatgttagtcgttcctttcaagttaagttataattattaaaacattctaatttgattttgtcaaactctaattttaaaattcgccagaaatatccttatcagaaaatgaatgagggtcggggacaaaagaaatatcagtgtcaattattccaaatttttctcgcattacattttcgatgtgctctgataattggaaacttttgaggatcgtcattttagcgttaaccatcacggaagcatcaagcgtgaccacatttccgttatagtgagcttttagttcgacaacttttacaacgtgtggaatattggtgattgtttggcggtattcctgttcagcccgcggatcaaagtagtcggttaagttaagactgctttcaaagaaaatttttagtccagaatacagaatgaagaaaccaacgacaatactagtagcaccatcaagccaacgaaggttaaagaggagagcaccgccaattgaaatcaaagttccaatactggtgaaagcatcactcaggctatcttgggcagaagcaagcaacgcggcgttttttaatttaagccctgtttggcgattcatataccaaacaactaacataataactgacgcgattccggccccaatcaatgcgactggttggggaaccacccgacttgcaggatcgaggagacttttaatgccatcgatgataacgcttaaggcaatcgcaaccataacgaccgctgtgacaagggaaaaaattgtctcataacgccaacgaacgaattgtactcgctggtcagatcccatgtgcgcttgataatttcccgaaggcagctgtgcgccgatgatatcatcatcatccacatcctgggcaatgtgtaagcccatcatcaataaaaaggtcgagataattcccgaaaggttgttaaaggcatcggctcgtaacgtctgcgatttacttatttcagctaaccagtactcgataattgaaataacaacataagcaatcaagttatagattaaatggtgttgggaagctcgaatctttgctagttcatttgcttgcgttttttcccagttattcatttcttcggttgtatgtcttttaaatttagtcattaatttaagaacttccttgattaataaaatcagtttaattgtaacgcaaaaaataaaagccgagaaaacgattttctcagcttttactcaaaataataatgaaaataattgctaggcccggttattaattacgtgggcgcatgttgcaataatcagtcccataaaacttactacagcgatcatattactcataattgacatcatattgaacaactcctttacataattaaaatattttttacagcacaactaattacagttgcctttttggaaaacaaattataatgattgttttcccctctccaccaagtattgtaacaggtcttagcaatagtgacgataataattagctaagcttttaatgagcttttctacgaaagaaaggagtgattataagcaaaatattataagtaactatcatatgaattaatgatttttaattattaagtcaaatcgaattatttctttataaaattaatctatttagctaatctgtttaattcttttaaggctagaggaaattttgtgaagccgtcactagtcaaaaagtggccgcctttttctttaactatgagttttgctctaattttattagcgaccgcaatgctattttgataaggagcgattgggtcatctttagctgttataacggtagctttagcaagtttagggagtatatgctcataatgaggctgatctttcataaactcatctaattcaggataagctggtaattctttgtcaaatgctcccacaagtaaaagtcgtgcatctttaacatgatgatgttcaatataacgaagggcggtaatacatcctaaactatgggcaacaaggatgaggttatcttggggatgaatttggtcgtcaaccgcttgatcccattcagcttgttggggattaaagggatttggtagccatatccgatcaagggtaattactggttttgcttcttcttcgagccatggaaaccagtcatcatcacgggtagacgtaccatgaattaagtatgcgttcttcattattaagactcctatttcataaagtgtttcaatattaccatgccgatgattaacaataaaatggcaatcgaattagtaagaatttcataaggctgaccgtgggcggcaattagtccccggattaaagccataattcctaagcttaataggaaatcgaccgcaattcggccatgatgttttagcgcggcaattatcattgtcataaatgaaaagaaaaaagacaataacacgatccaaaatcttaaaaataacatgatccgtattcccatcttgcataaggggaatcagccaaaaagtttccgtaaataagataatagttaataaaatccctagaattgctagtgcgccgattgtacatagacataaaatatggctaaaattagccgctaatttatatatttttttcattctcttatactcctcaagaaaacgctttaaccttaggatagcaatgatcaagaaatttagctaatatttaacaaaatagttgttaaaaatatgcgatacttaaagatgaatactaaaaggaggggcgaaaaatgcgaaaaccctttattgatgctaattggaagatgcataagaatgtccaggaatcggttgaatttgtggacgcaattaaaggaaaactgccagatccgcaagaagttgaagtcggaattgcggcccaagcttttgcattaccgagtatggttcatgctgctgatgattcagggttaaagataatcgcgcaaaacgcggcagctgaatattcgggagctttcactggtgagattagcttacgaggtttagctgatgccggtgtttcatacgtaatgttagggcatattgaacggcgccatttattccatgaggataatgagttggttaatcgaaaagtgttggcggcccttcaaatgggtgttaccccgataatctgtacggatgaaacgatggttcaaaaagaagtcaacggagagattcattacgttttccaacaattaatgagtgtattgaggggcgtttctcttgaccaaataaaaaatgtagttgtttcctatgaaccaagttgggcagttggatatggtcagcatgctaatccagttcttgctgaagaaggatgccgtcaaattcggcgaacgattgctgataactatacttatgagattgctgataagatcaggattctttatgggggcagtgtcaatccagataatatcggaatgattatgaacaagccggatgtggatggagtattaatcggtcgggcaagtttagatgttgataatttcttgcgaatggtcaattatcttaaaaatgatcaagaaaaataaaaaaagtatttctctttgccgtcattttatgttatagttattaacagttgttatggcggtattggtgaagtttggttaacacaccggtttgtgggtccggcacgcgtgggttcgaatcccacataccgccctgacctagcgcgatagcaaaggatttttcctttgccatcgcgtttttttgtattctctgttttatgaattttaattgataacatccaagaaagtaacttaaaatagtaagatggagaaagaaaaaggggctttaattatgaaaaacgtacaaattggtggaacaagttggaaagtatcgaacgttgcattaggtattatgcggatggggacgttagcagtgactaaagcgattgatgccttagaagccgcccacgatgctggaataaactttattgattcagctgatatttatggcaacgacccacagttaggacgtggatcttcggaaatccattttggtgaagcattaaagaaaagcagtcttacccgtgatgacttttacattcaatcaaaaggaggactttttgcgaacgcggataataaaataacgcggtatgattcgtcaaagaagcatttaatcgctgctgttgatggaattttgcaacggatggggattgattatcttgattcatttttgattcatcgtccagaccctttaatggagcccgcagagatagcagaggcctttgaccaacttcaagcatctgggaaagtccgccattttggagtatcaaattttaacccgcaacaaatcgcgctccttcaagcggcgacaaatcaacgacttttgattgaccaggtacagtttggcttaaagcatacggggatgattgattttggcctgcatacaaatatgactgatgatgctgcaatcaatcatgacgggggattattagaatatacgcgtcgtaaacagatgacgattcaaacatggtcgcctttccagtacggtacatttgcagggacgtttattaataatgatcaattccctgagttaaacgcaatgttagaaactcttgcgcaaaaatataaggtaagtaaaaatgcaattgccgttgcatggattttacgtcaccctgcgcatatgcaagtgttgcttggtaccatgacgccagctcatattattgacagtgctaaggggagcgatattacattgacgagccaagaatggtatgatctatatcttgcggccgggaatgatttgccataatgaaaaaagattatctccagttctatcagcatattacagctcctttttatcgatacccgtggacaattcctttattacgggcggttaataaatttgttgtgtggactatgtacgttgcttacatcgttatattagtgtgggtagggaaaaataatgtcttgaaagcaggaccttttctgcttattcccggtattggctttatcctgctttcttttattcgccaacgaattgacgcaccacgaccatatgaagaattttcgattaaccccttaattctacgtcaaaaaactggtgattcattgcctagtcgtcatgttttttcggcgactgttattgcgatgtgtgggttaaggttaaatttgattttaggagtgatcttactcgttttagctgttgtttctgctattacgagagtgattggcggagttcattttcctcgtgatgtggttatcgggtttatttgtggctttatttgtggttcgtttttatttcttgtctaaattttagaaaggtgtatttcatggacaattcagtgctgcaagatgcaattttgaatggacttattagtactcaatatcaaggtaatacgctgctaggtccgcaattattaaccaacaaccaatcatcgacaatttggcaaacgttacggcacgaattactgtcatgtaaagactttacgtggtcagttgcctttattacgttagatatgttagtcccctttaaggcagtgatggctgacttagcacagcaaggagtacacgggaccatcattaccagtaattacttgaattttaatcaccccgcgatgtttgaagaattgcaaaaaattcctaatttaacggtcagaattgctgatcttaatggatttcatactaaggggtatttatttgatcatgggaaatatcagaccgtaattattgggagtgctaattttacacggtctgctttattagttaataaggagtggaatttaaaattaagttcccgccaagaaggaagcttttttcaacaactaacgacggaattggatgctgttaaacatgagagtactgttctaacgtcagagtggattgcggagtatcacaagaattggcaaccaccaaagactagggtgacgcaaccagaaaaattaaaaccaattgaacctaatcaaatgcaacaggccgctttaggacaattaagcactctgataaaaactggcgctaagaaaggattggtcgtttcagcaacgggaactggaaaaacatatctgggagcatttgcggttaaaaaatatcagccgcgccgtttcttatatatcgttcatcgagaacaaattgcaaaaaaatcgttagctagttttcgacgagttatcggcggcaaaaaaactgattacgggttattgacaggtaatcgccatgattggaatgctaaatatttatttgcaactgtccaaacactaagccaacaagcagtactgaataagctcaaagctaccgaatttgactacattttgatcgatgaggcccatcgtgcagcagcacctagttatcaacgaattttaaaccactttatgccgcaattttggttggggatgactgcaacccctgaacgaatggacaatcaagacgtatttaaactgtttgattatcatttagcctatgaaattcggctgaaagatgcattggctgctaaaatgttagcaccattccattacgtgggggttaccgattatgaagttgatggagaaattattactgagacttctaagttaaaccaattgattgctgtaaaacgggttaattatgttcttaaccaattagactattatggatattgtggcgatcagccccgtggattagtattttgtagtcggcaggcagaggcaaaagaattggcagtccaatttgccgcggctaaccatcctgcaattgcattgacaaatcaaagtagtagtcaagagcgagcaaaggcagttgagcaattagaggcaggaaagattgagtatatcattaccgtcgatctttttaatgaaggggtcgacatcccatcagtaaatcagattgtaatgatgcgtaatacccaatcaccaattgtgtttattcaacaactggggcgcggcttgcgtaaatatcctggtaaagattttgtgacagttattgattttattggaaattaccaacataattacatgattcctcttgctcttaaccaggataatagtcgaagtaaggatcaagcgctccgtgaagttaaggtgccaacgaattttgacgtttcaaccattaactttacgaaggttgccgaagaacaaattttagtctcccttgataaagttaaattggactcgatgcgtgaattgcggcaggcataccatgatttaactaaccaactagggagaacaccattgctggatgacttttatcgttatggttctgttgatcccgagtatttgcgcaaaattcccagctcaaccattatggtgacttcttagaaaagatggggatagaacttaaattaacaaattatgagcgtcaagtactagcctttttaactaaagagttgcttaacggtaaacggccacatgaattgattctccttcaacgcttacttcgcggtacgtgtttaattgatgcttttaaagcagaattaaagcatcaaaatattcgcgttacaccagctgttttacaatcagttgacgatattttaagtttgcaattctttaatgtaaaagctggtaaacaggtaaaaaaggatcagtatggcggacagccgattattgatcatccagatttgttaacgtatcagttaaattcaaaaattcgagcaggactagaaagtcacaatgatttcaagaggttgtttatagatgtactaacaacgggacttgaaatcgctaagcaatatgacctcaagcaagcatttaccctttatcagcaatatgaccgcaaagatgtttgtcgtttattaaattggcccctcgatgtaagtgcgccgttatatgggtatcgagtggcagaagatatgtgtccaattttcattacctaccataaggatgtggaagaaaaaagaaatgctatttataataatcaactacaagatggacgttcattgcgctggtacacacggacacctcggcatctttcatctgatgaggtccagcggttgcttgcaggagtaaaagagggtaagccgcaagtaaaattacacttatttgtaaaacagagtgatgcagttggcaaagaattttattatttaggtcctgcttatattcaaccggactccgtaagagaagaattggttgggccaaagaaaaaagcggcagtggggatggatttagttttagaacatccattgacctcaactatgatgaacctattggcaatgtaaccatcaatatatcgcttttattttttgctaaatcttctataattaaaggcgtagaaagaagatgcatattatggcaaaaggaaaggtaaaaactagtgataagcgttcagttcgggatgttaaattagatgaattggctggcttactaaatgaatttgatgtcaatacgataggagcactagtaaagtctctaaagaagagttaaaagaagaacaagcaaagcaagaaagatgaattacgtgataccattgaacgataacaagaacatatcgatgaacaaaaagacacgattgatcaacttaataatcatatttctaaactaattgatcgtcttgataataagctataaaaaaatgaggctgagaaaaaacttttgttttttcaacagcctcgtttttcatacgaatattgttacgatatcgtggaactagccttgagccttgtcgaggagattatttctcacttctatttcttatcattcttttttatttactggttgtttaaataaatcattaaatgcttcactaattgttgggtgggtatagatttggtcccgaagtatttgataggggagttttgcccgcattgcaagaacaatcatgttgataatttcttgcgcttcctggacataaagggtagccccaataattaagttcgtttgtggatcgactaataccttaagcagcccacgggtatccttcaatacttttgcttttggaattgcggcagcaggcatcttaaagagtaggtaatctttcccttgtttttgcgcctctttttccgttaaaccgacttgtgcaagggaaggttcaataaaaacattggttgggacaattaaacgatcactaactcgccgttctttattaccgaataattcatctttaataattcggaagtcgtcaagcgagatgtaagtaaattggggaccacctttaacatccccgattacccacacattaggaacgctagtatggaggaggtcatcgacaacaatcgcgccgtttttagcgaccttaatatctgtgttttgtaaatcaaggtccgccgttgcaggcttccggccggttgccactaaaattttatcagcgaaaatagttgtttcacgattatcagctctagcaaaagtaattgcagcttgctcatcttgttcgctaattgccttaatatcaaccccaacttcaaagcgaaccccgttatccttaaagttttgaattaccatttctgccacatcatcatcttcacgtggtagtaaagtctgatggtgatcaagaaccgtgacgtgtgaaccaaaggaagtgaacatatttgcaaattcaagaccaatataaccgccaccgataatcacgagttcacgtggtaacttaggctgctccattgcttgggtagaattcatgagaaatggactactcttcaatccaggaatatcagggatggttggtgttgcaccagtattgataaaaatacgttcacccttgtaggaaagagtttgcccatctggcgtttgcacatcaatcgtgtggttaccagtaaaatgagcagttccatctaagacagtgatattttcttcgcttgctagcatttgataatttttttgtcggagttgggatgtcattacattttttccatcgaccgcgtcttcaaatgaggttccatgagcagcttcaataattagccgtttggaagggagacaagcaatattaatgcaggttcctccatacatttgcttcgatttttcaataacaagaacttgttctccatgttgagcgagaaacttcgcaagcgtttttccgcccttcccaaaaccaatgataatatttttgactgttttcatggaagaaacctccaattttaattattttatgtaccttcaaattatactaagaataaacgctttgtcacttaaaacgctcaaataaggcaattgtgcagtttgcgttatattgaacaaagtgttaggataatatcgtaaatatattagtcccaactgcagtcagaacttgtatattaaagaaaaacgtattagatgaacattgtatattattgatcatagatggtgcttcatcaaaataaaacgttttactaatttataaaaagttttgattgaggagagattataatgaaagctgcacacttagtagaacactcccaaaaagcaaatgaaaagaagcaagttattcaagagaccaagtttatcgacattttaagcaaggttgcaacagtcgtagctattttgatgtatgtatcttacatttcacagattaagaataatttggccggaaattacggtgctcctttacaaccattagtggcagcgcttaactgtacgttatggtgcatttatgcttacttcaagcagcaacgtgattggccagtcttctgggcaaatttccctggtattatctttggcttaatcacttttatcacatgtttacactaggaaaaataggattgcgagaaaacaaaattttctccagtcctattttttatatgctaactctcaactctatgatataattaaccgaacgtatgtttaggaggagtagagatgccaaaagatgggatgtcggtagttcactttagttcttttgcgccggtgacagagatgattttacagtcgttgccagccgtgaaggacaaagaggaccagaaagcgccggccattaaaaactttgatcaattacgtcaacgattaaatagtcatgcgcgattccttattttggaccttgagttttttcaggatcagcagaagcatcgaaatggcgttgctcagattgcggggaagatgtttgaaacacaaaacagctttaattactacctctatgcccagaatatgtctgctgagcgacaattggcctttttgcgacaatatgacctccgcctttcagaagtaaacggatatgaggttaggcagatttttaaccggatttttcatttcattgcggtagagcggcctgactatattgtaagctgggataatggaactgactttgaatcattgaattatgaagcaaatcgattaaagattaggaaagaggatcgtccctggcgtacgattcagtcgttagatctggaaaagctagtcgctaaagaagtatggaaaagtaaaagtgggatcagcctggaaaagatgtgtcgtttattgcaccttccccgggttaaatatcatcaagcccaaaatgatgtgatggcgattgaacagatcttgaaattttatgcttgtgatttagagcgtgaattaaattgtcgctgatcgttaccaaaatttaaaatttagttcatgatttatcccgattgactttttattattagtaataattgaaagaaggtgaacgagataaatttcatttttcgactgcttaagcggatatttataataggacttttagtaggtggaggatggctttatttcaatgatgcacaagttcaagcaacggcgaaccaaactgcatggaacgttcgtgatcgcattgctaagttaattggcagagacgatacaagctcaaacgataattctaatctgcacttaaacgatacaaacaatggctcttccaaaagtgaccaagaaccaacgacagaacaacaaacaagtacacaaacttcaattccatctactggacgatgggcgactaatcaagcaacggtctatgtaaatacaaataatgctcaacttgacgcagctactaatactgcaattcaaagctggaatcagactggggcgtttacgttcaaaccagtaaataatcaaagtaaagcagatatcgttgttacaacaatgaaccgttctgattcaaatgctgctgggttaacgaagacgtcctcgaattcgttgacaaggagatttatgcatgcaacggtgtacttaaatacatattatttaactgacccaagttatggctatagtcaggaacgaattgttaatacagccgagcacgaactggggcatgcgattggacttgatcataccaatgctgtttcggtaatgcagcctgctggatcattctatacgatccaaccagatgatgtgcaagcagttcaaaaactatatactaataataaataaaatggcgagactgaaagaagtaaatttctctcagcctcgctattctatttagtctgtcattttccgtgcttttagtgcccataagatagagacagtatcaattatttcctgtaacatggcgccgaaaaaggccggaatgattccggtgctagcaataagcattaggatagtacagattgcaattccgattaggaccgcctgttttgcaatccgcagagtttcctgagaaatgctaacggcttttgcgactcgcgaaaggtcatcttttaggataacaacggcagctgattcactagcagcggttgatccgtgagctcccatcgcaattccaacatcggctgtcacaagagaaggtgcgtcgtttacgccgtcgccaaccatgaaaacaggatgttcatttgttggaatggctttaagtgcattgattttatcttgtggaagaaggtcggctttaacctgcgtgatcccgacttgttgggcaactttatctgcaatgacagcttggtctcccgttaacattaatagattggcaacaccaagccgttttaaccggttcattgtttgctttgcttcaggacgaatatggtcggtaaaagtaattgcaccatagtattgcccatctacgctcacatagatagctgttgctgctaacatctggtcaagattttcaggagatacgaattttaattttcctactttaacttcccgcccatcaacagttgctaaaattcctttaccagttaattctttaagttgatcaacggttgataagaaaacattatatgcagtggcataagaaagcagtgagcgtgctaggatatgtgatgattgttgttcagcacttgcagcgtaatggaggagctgcgttgagtctatttttcctgtagggaggattttatcaacggtcaattgaccacttgtaatagttcctgttttatcaaatgcaccagttttagcaactgctagtttttccagtacactccctgttttgacaacaattccatttcgtgaagctcggctcattccagaaaccattgccacgggagctgcgaggattaacggacatggtgaagcaacaacgagaacttccgcaaatcgttcgggacgaccggaaaatacccatgcaagtgaagagataataatagcaataatcgtaaatggaacagcgtatcggtcggctaatcgaacaaagtgggcaggagtcgattcagcctccttaaccaatttaacgagttgctgatattggctatctttggctagtttggtgacctgtaaagtaatggcattatcaccattaactgatcctgacatcacttcgtcaccagctgtttttgaaactggccgtgattcaccagttaatgacgattcgtcgaacaatccctcaccatttttaataattccatcgactggtactaattctcccggtttaacgataagctggttgccaactttgacatcgttaactgggatgtcgctagttttgccattggtgattaaatgtgccgtttgcggtgagttattaagtaatgcttttaattcggtgcttgcttttttggcagcataatcttctaaggcatctcctccggttaacattacaagaataaccatcgctgcccagtattcgctaacagctagcgttgcaacgacagccataatagcaagcagatcaacgccatatttaccgctacggatggtttttatcatgccaataaacattgaaaaagcaacaattgcgccgacaacagtaaccagaatttgagcaaaaagttgtaaatgaaatccaaattggagcacaactgcgattgctgcaattactaggatgatgattaatttttgcttattagatagttttttcataatacccccgcttagtcctcgtgctttctacaatttaattatagggtttttatgcaatgatataataaaaaattagaaatattaaggaaactggtgaaaaataatgcaaaatggacaatcttatcaacgaatttttgtagtgataattgattcattagggattggagcaacggctgatgccaatcattttgagagtttaggggctgacacactaggacaccttggggaacattttcgagtacggctacaactaccgacttttcagaaaatgggtcttggcaacttacacccgattatggggatgtcttcgcttgaaaagcttcacgctgcttatggtcaaatgagttcaatttcaacgggcctgagtgatcgcgagagccagtgggagatgatgggcttagcaacgaccgctgaacctgacgtttttattgatggtgtgccgttggaaatagcgactaattttgcgcgaaaagcaaagcgccctcttttaagcaattccttaatgaatattcgtactgcgttgaaagattatggccttgaacaattgacaacaggtggtctgctagtagcgacggctagttcttcaagtgtttggttaattgcgcatgaacagactatttcggttggcgaattaaaagaagattgtcagattttgcgaaaaatgttggataattccccatatactatcgaaaatgtgaatggccttctttttagtgggaaccaggcggctaatttttatccccaagaactttatagatttcctttagctccagcaagtccaacggttattgattgtctcttggaagagggttatgctgtgaagttaatcggggaaagtacccagttctttggtttggaccataatgaaataaccgggaataatcaagagagctttgttcagttgcaagaactgatcgagaaaaagtttacaggtatttgtatagcagaagtgggagagatagagcaatttggtaaagcacgtaatcctgaaggctttggaacggaattaatgcggattgaccacgaacttacaaaagtcatcgataaaatgcaagatgatgatttactgattgtgacggggaacttcgggaatgatcctacttatcctggtgaaaaacatactcgtgaatatgtacccttacttataacagccccgcaaattaaacaaaatatttctctcggtggcagaagttttagcgatattggggcaacaattcttgataattatgatttaggagataagttgccagttggtaatagttttttaagaaaattattttctgcatatagataaaagaggatggaaaaattctgattttccatcctcttttatctatattaacgatgaaatttatagtaaatagcaattcccataatcaaaagaaggacaagggcagcaagacgcgggtttgttttaaataactcgtgcattgcatgaatttgtccaataccaaggggaagagtaaacatagaaaagacaccctttcaaaatttacttaaacgcttagtagttttttataaggaattctttcatatctgttggttgatgtccagtgatatgcgcaaagtcgtcagtgacttggttcatcaagcccattgcagctgcttggtacatagaagcaagttcgtttccgtcaccctcagcagcgtaaatttcagcaaatttttttacggtaacgggatcgtaaccaatttcttcacccgtaacattagtcataatataactaagttctggcattgtataatttttgctcatggtaaggagataattttgtcccttatctcgcaagtatggcttgactgctacattggcgatggcttcagcgctatcttggcggaaataaaactaacatcgactaaattatgaacatctgccttaaacattgcagttagtgaattctcgaattcgtcaattcgatccttaactaagtaggtaatacttggaatatagataacaatatcaattccgttaaaggccgctgtcatcttagcgacgtcatagtagtcaattgccgcaatttcgtatccggcatctttgaattgggaagcttttgcgggattgtgaacgccaacgcggatattatctggagatataagcttgcttaattgcttaacaacgtgttgaccaaggtgcccggttgccccagtaaccatatatttcattattaattccttctttctttttcagcatcttttagtgcttgcttaacgcgaatagtgtcgatgacatcctgtaaactgattcttgcaagtttagcttttgctgctgtttctgcttgctggtaaaagccatcaagcgtctcttgaatattcccgccaacgatgcattgtggatttgttcgttcatcaatcgtaaatagatgagcatctccttcgatcgcaagaaaaacatcataaagtgagatgttttcaggagattttgcaagtgctggatctgctgcaccatgaacggtattgattaatccggctttgttgagcgcactcatcaaacgtcggacgacaactggtgaagtttcaatgctgctagcaatattattacttgttaatggaataattccttgataaatattaatgaaagcaagaatgtggatgctatcactaaaacgggttgaaattttcatattatcattcctttaatgctaattgtaatttataaagttacatgatgtcaagagattgaatttatcattgccttgacaattatttgttttagatatagtattagtttattgattgaaacttttttagttacaagctaggagaaaataaatgagatttaagaaaatcgttgctctttcattattaagcattgctggcttactagcagggactattacgccggcagtagcaagtgctgccagcaataaaccaattattgtgggttcaaaaaatgtttcagaaagtaagactatcagtgaaatttacgcgcttgcacttgagcatgagggttataaggttactcggaaacccaacatttcaaataatgtgatttttagtgcaacacaaaaaggcgaagttgatgtttatcctgattatacgggcacaattgtagaggcgtaccttaaaaagaaggggaccggcaagagtgctagtcaaatggctaaattagcacacgatggtattcaaaaagacggcttaacgacatttaaatacgccccaggtgataatcgccaaggtgttgcaatgccaactaaggacgcaaagaagtaccacattaccaatttaagtgaactgcaaaagaatgcaaagaagattaactttgcttcacagggtgagttcgaaaaacgtgctgatgcccttccggaaatgaataaggtttatggtaaatttgattttaagtcaattaaggattatgacgtaaatttactctataagattatggaacaagggaaagcacaagcagctccggtttcaacaactgatggtcaattagcaactgacaagtttacgttactaaaggacaataagaatatttggccaccatataatttagttccagtagtaaataaaaaagctgccaaaagtcatcccaaaatggagcaagccttaaataaagttgatgcaaagttaacaactaagcaattaacagatctaaacaagaaagttaatgtcgatgggcaaaattataagactgttgctaaaaattggtataatcaaaatatgaaataagtgccaaaggggcagatagctagtttttcttgctagatatttgctccttcgttataggcaatagatggggagtggtagcttgctagggcaaataattcagtattttcaaacaaatagcggccaatattggcaatatgttggtcagcatataattctgactgttgtaacgctagtgatttcaatgatcattgcattgccattaggatatattggttcgcgaataaaaccagttgctcaattttgtgtgatgtttgcgcaattgttacgaatcattcctagtttggcattgctgtttctattaattccatttattggaacgggggttgtccctgcgttaattgctttaattgttttagcgcttccgccgttgctaatcaatacaattctcggttttaatgaagtgagtccactatataaggaagttgggatagccctagggatggatcagcgccgattacgtcggcaaatagaaattcccctggcgttgccctatattttaaacggaataaaactagcattggttgagatcattgctagtgcaaccttagctacttatattggtgctggtggattggggaccctaatatttactggcttaggcttatacgatatgagttatgtagtgattggcgcggtaagcgttgctattttatccttgctggcaatgattagctttgattttttaattagaaaggtacaaaagcatgacagaaccaattattcaatttaagcatgttgagaagcgttttaacgatcaaatagtgattcctgatctcaattttacagtcaacaagggcgaatttataacgattcttggctcatctggttcggggaaaacaactaccttgaaaatgattaatgggttgatagcgccaagtgctggtgaaatcttagttgatggacaaaagcttcgagaactcgatctagtaaaattgcgccggcacatgggatatgttgtccaacagatcgggttatttcctcatatgacgattggacaaaatattgcagttgtgcccaaaatgctgcattgggataaggaagagattaataatcgtgttaaagaattactaagtcttgttcaactaaatcccgctgaatatatgaaccgctatcctcaacaattatctggtgggcaacaacaacgcgtaggagtggcaagagctttagcgactaatccaccgtatgtattatttgatgaaccctttggcgcgctggatgccttaacaagaatggaattgcaacgagaagtaaaaaagattcatgaatcgttggcagaaaagacttttatgtttgtaacccatgatattaatgaagccttatttttaggtcaacgagtgatgatcatgcatgaaggacgcatcgttcaatttgctacgccagaagaaattgttcgccatccagcaacggaatttgttgagcagcttttagggacgattcgccaaaatcaagatttgtggaggcaacaatatgattgagtattggaatgagaattggccgataatgcttgatgatgtccagcaacatgcaacgatggttctttcttcattagcaattgccttagtgattgcggttgtaataatcttattattcttacggcgtgaaaaatggcttaatagtttgatctatttcttttcactcttatattcaattccaagttttgccttttttgccttactcttaccgatttctggattaggaatgaagactgcaattattgttttaacgatctactctgaatatgttttattacgttcctttattacgggaatccgtggcgttgatccacaattaatcgaagttggtgtggggatggggatgacatctcgacaggtttttcgccaaattcaattgccgctagcattaccggcaatttttagtggaatccaagtggccctagcttcgacaatggcaatggcaactattgcggcaacgattaatgccggtggtctgggtcaattattgtttgaaggactgcaggggcaacaggtcgtgccgattttgtggggaacagtcttaacaatggctttgacattaatttgtgcaggaatcgttcaattgatctcgtggatattgttgcatcggtggaaaggagtattaaataactgagcaggaaattagtagtattcactgagaattcgtataatcaaaataggtaacgaaaacgaggaggatgctgaatggataaaaatgaattaaagaaattaacgccaatgcaatatgctgtgactcaaatgggggttacggaaaaaccatatagtggtaaatatgatcgatttgatgaaccgggtatttatgttgacgttgttagtggggaaccattattctcatcattagataaatacgatgcaggatgtggttggccagcatttactaaaccgattaagaagcgtgttcttacagaaaagcgcgatcaatcatttgggatggaacgaaccgaggtaagaagtaaggaagctgattcgcatctcgggcatgtctttactgatggtccaactgatcgcggaggattgcgctactgcattaattcagccgctttgcagtttatcccagttgataaattgcaagaaaaaggctatggagaatatctaagtttgtttgataaatagttaaaaatcaagggagtgggaaataacctcctcgacaaggcggttggctaagctaggatgatgattagcacggcatgggctgattatccttcgtacttagactcgagccttgtggttattttctacgttatctttctattgttcataaaagtagttgaggatgatgaattgtttaaaaaattcatcatccggtttttattttggactaggagttttttcccagcctccattctcgattttggttttaaattatttatccataattggcgattcatcccccacttctacaagtgggggatgaatcgccctcttaaagcacgttagtgctttttcttttgttctatgatatatttagtgtatatcaatatgagagtggtggtagtaattaaattggatcgtaatcaacgttcagtatacttgctgaattaccatttggtaatggtggttaagtatcgtagaagagtaattaacgatgaaatatctgaatatcttaaacatcgttttgtgattgtaggtcaatcctatggaattaatttacaaaaatggaatcatgatcaagatcatgtacatgttttgtttagagcaactcctcacacggagatggctaaattcttaaatgcttacaaatcatccagctctagaatagtcaaaaaacaattcccagaaatcaagcagtatctttggaaatccgccttttggacacaaagctattgtttaattagtactggtggagcactgttagaagttgtaaaacgatatattgaaagtcaagggagaaaataatggttctaaaagccgttaaaatgcgtatatatccaaactctgcacaacgagaccaactttggcaaaccttcggttgtgttcgttttgtgtggaatcaaatgcttaatatgcaaattgaacggcgtaaaaataatccagaggctaaatttgttaatgcctttggtatgaacaatctcttgaaacaacttaaagttgaatatccttggcttaagcaagcagaatcaactgctttgcaaagtgctaatcgcaatttagccgatgcttttcaacgcttttttaaaggtcaaaataagttccctcggtttaaatcaagaaaatattcgcaaagctacaattcaaagtacgttaatggcaacattagaattctagataggcatcatattaagttgccaaaacttggtgtggtgtattttagagctggacgtttgccgttaggcaaaattaagaacgtcactgttcgactaaatgttgctggtcaatattacattaccgttttagtggagagcgaaaatcaaactctccctaaaacaggcaaatatattggtggcgatttaggacttaagtcattactgaatctctctgacggctataaagaaccgttgaatcattttgaatctaaatacagcaagaagttgcaccattgggaaaactacgcagtcgacgttacttaattgctcaacaagctatcgcttgggatcatcacaataaggtgttaaagccatgccaactcgatgatttcaaaaactaccaaaaggcacggatcatggtagctaaatatcggcaaaagattgccaaccaacggttggatcagctacaaaaattcactactatattagttaaaaagtatgacatcattgtgttggaaagacttaatactaagggcatgatgaagaatcaccatttagctagggcgatcgctaacgctagttggtcaaaattagtagatatattgcaatataagtgtgaatggtatggaaaaaaactcattcagatcaatccatcctatactagtcaaatctgtgcaaattgtggtgaaagcaaccatcggttgggactaagtaaggctgaatggctaggaattagggaatgggactgcccaaattgtggcaaacatcttgaccgcgacattaatgcggctcaagtcattcttcaaaaaggtttggcgattcaataattagataatctaaaaaatacaggctcgggacgagccttggttaatagtcgtaacctctgcttgaaggctcgttaagaacttgtaaagtaagtatgcgatgttcccagaatctcccacttcaagcgttaaaccgcaggtttagctaagtgggagtagttcaattttcttctaacattgcatcataaagtgaagggcgaccacctaataaacgattaacataataggcgactaaagtaattaatgtcattggcaaaatttgttcaactgaaccaaccatttcagttactaataaaattgcgaccattgctttccaattcgttgaaagtgacatattagtgacatatttaataaaatcgtgactaccaccaagaatataagggttccataatccaacaggaataactaataatagtggaataatgttatgaaattcttttggaataaatgtgattttgctgtaccaccaagttaggtttagtgctgcaaattgaaaacggtatgccaagaaaccaatgacaacgccagcaacgattagtcatggataggatgcgactggtaatttagttgtgatcggaatatataggcaaggtttagtaccaaagaataaaaaaagtgataaatgcagaaacgattgaagaagttaaagcaggaatccaaattcgagaattaaaattatggatcatttcttctaataaaaacattgttcctgctaaaggtgcactaaaagccgcagataatccggccgcaacgccatactccatcaataaatatttatctttgtccgtaaagtgaaagaatttttcgttaaagcaggctccgatacaggcatcaatttggatacttggtccttcacgccctaagaaaagtcctggacagatagtaagcaaactagcaacgaatttttgccataatactggccaccaatgaatacgatgctttcctaacaaaacagcttttaattgggtaacgccagaacgaacaacatctgtttcataaggcttaacgatttttccgattaaccatgcaacgataaatgttcctaatatatatggaattaatagccaaggatgtttacccataaaaggataaataattgtcagtaaagtaagggtccggtcgataatccagcgaaaagccccgatcaccagaccagttactatcccaatagcaatactaacgccaaggtaacgagaaacaatggaggtgaatggttttcctaaaatgtcccgtgcccgtttgtgatataaagtattttcgcctttcataaatactgccttcaataaggtattttccctatattagcataaaaagagagtgaacaataacagtctacaagagataagtattgttcactctgcttttactatgaactttttaatttaatctgtgttggtgtttaccacccacaaataaacttataattgaagctactaaaattgcggaaaaacttacaacagcgattacgttacttaataatgacatcatggtaaacaccctttcttaataaatcttgttatcgctttcatcaactatattatagcattagttgaccaagattgatcaaaaaagaccttttattttactaattagggttgttatttcagcaactgcctactctttaaaaaagtcacgaataatttgtttataagctttaattgtagcaacgtaactcgaaatagttgtatattcatcagtttgatgagcaacgttccaatcgtcacatcctaaaattacaactggaaggtcgggacgatttaatgtaaatacacttgcgtcagttgcaccattgataatatcaagcttgatgtcatttggatagtttcgctgggcagcattgagggcaatttggacaaaatcgttattaggttctgtcgcaattggataaaaatcttgaataatttttagctctagttggaaaggagttgtgtggttaatatattcaagcgcatcatttaatcgatctgcaactttaacattattaaatgatgccgtagggcggatatttccttgcaaactagcactgtcggggatggtattaacttgagatccaccatcgataactgtaatactatgttggacttttccaaggtattgatcatctttggtgttatcaaaaaggtgtttttcttcttcgataaactttaacagcccttcaattgcattaataccattttgcgggtgagaactatgacaagattttccataactggtaacgcggtaattcatactccccgagtgagcaaaaataacattcccaccggttggttcgccgactactaatgcgtcaaggtcatcggcaactccttgcttttgtaaacgataagctccaggagtaccaagttcttctccggcggtagcaataaatctaacagttcctgatggcagttgcccagcttcttttaattcgattaatacaatagcctgggcagccagaccgctcttcatgtcagcagctccacgaccaaaaatataatcaccactaatttcaccgccaaagggatcatgttgccagcggtctggattaggtactgccacagtgtcttggtgtccagtgagcccaaggatttttttactttccccagtcccaatttccgcaatcaagtttgcacggcgatcaccaaattcatcaacttttgaatcgattccgtgatttgctaaaagtttttgtaagtagcgtgctacttcaacttcatttccattaacagaatggatttttattaaatcctgcagtactttgactttttcactgacttccataatgatccctcctatatgttagcgatcttggtggttaagcttcttggctaaaatatcgccaactacttgaatgattaaaacaaataaaagaacaagaatcgtggcgacaagggttacgtcgttgttaaaacggtcgtaaccgtatgaaatagcggtattacctaaaccaccagcaccaattgcaccagccattgcagtaaggctaactaaactgattagtgtaacggtggagacacggacaagttcagaacgagcttcgcggaggtaaacgtcaataatgatatcccagttagtagccccaatagcttgggcagcttcaattttaccgtggtcaacactttcaagcgcaacttgaacttgacgagcatagaaagcaaatacacctaatgaaagcggcactaatgcggcggttgttccaatctgtgttccaacaattaattgggtgaagggggcaatgaaagccaacaaaatgataaatggaattgcccggaaaacagatacgactttatcaacgatactaaaaacaattcgattttctaaaattccaccgggctcagtaaccacaagcgcaactccgaagattaatcctaaaattccaccgaaaatagcaggccagaaagtcatgtagatagtttggacgattgaagtaccccaaccattgtcaccaccccagccaagttgaattacatttggtataagattattcattccaaatcctccgatcatcaatctttgtgacagtaacatcattttcttttaagaaatcaatagcttgttgacacttatcagcatcgcccttgataactacaaacagggtaccgactggtgaaccagccaagacttcaatgtttccataaagcatacttgcttcaacttgcagcttcttatataactcgataatgattgatttagtcacgttatttgcatcgtagactaattgcagcaactcttcatcatcatcaaggtgaccaagatcaaatgctttaagggtatcgactgcggctaaggatcctcccacaaattgccgggttaagtcttgttgtggttggaggaaaactttctgtaaggtaccacgctcaatgatttgtccatattccatgacagcaatcttattcgctacccgtttaacagcgtccatttcatgggtaataaggacaatcgttaaatccaatttatcattgagccgtttaagaagatccaaaatctggtttgtattttggggatcgagggcagaagtagcttcgtcagagattaaaatttcaggatcgttagctaatgctcgggcaatggaaactcgttgttgttcaccaccggataattgaacagggtagaattcagctttatcctttaagccaactaagtctaaaagttcaagtgccttcttctcttttgcgtcattgtctaaatcagtatgtttaagagcgaaaagaacattttcaattactgaagtttcatttagtaaattgaagtgttgaaaaatcatgccaatttttcgccgcttttcttgtaattctttattgctaatttgctgttggtggtctttgaaaaagacagtaccattaactgttactgatccagcagagggaagttggaggaggttaatggttcgaactaatgttgatttaccagctccagaataaccaacaatcccataaatatcgcctttttctacttttaaagtaacatccttaacggcgtgaacaacctgttttcgttgcttaaaagttacgctaatgttatctaagtcaatgatcgggttcgccatattaatcctcctttatttattgaagttgaggttccaagcaggaatttctgcagttccgtatagtttcttaatttctcgttttgttttttcagtttggtaagcacgtacaacatctttgtaaatcttgttgttcttttcgctgtctttaacagcaatgatgttgacccattgttttgaatcctagttaactggttcaacgaaaattgcactcttgtaattaagaccagcagcttgtgcatagttagtattaacaactgcagcatcaacgttatctaacgaccgtgctgtttgatcagcggctaattctttaatcttaagatcgcgtgggttcttagaaattgaacttacggttgcgagctttgtgcccttctttaggtcaatcaaaccagcattctttaatgcgaataatgcccgtgattcgtttgaagcatcatttggtactgcgatcgttccaccattaggaatttcctttacactcttgtattgcttggagtataaccggattggagtaataaatgtatcgcctaaagaaacaagatcagttttatgggctttattccaagtttgtaagaataacttgtgttggaaggcgtttaagtcaacatcgccattttccaaagccttgtttggttggttgtaatcagtgaatcgtttgaattttaaagtaacattgtacttatctttagcggttttgcttactgaattccaaatttcatcatcttgttttgaaccagccataatcccgacagtaacagtccgttttgcttgttgttgcggacggataaaactaaagtatccggcaataacaacgataagtgcaactactgaccaaataatgatatttcttcttttctttctcttcatagtaaaaactccctttcaatcaattaaatattttcgttggttaattaaaacgttaacttgctagtaaataaaaaagcactcgtccctttattcaaaggacgagtgctcgcgttaccacctttatttgctgaatcttcacagacccagcctcagtaggttactctaataaaacaattagaattacctagcactaataacgtgtgctaacccgttatcgactaacaatcatcgataccattccaagcccatcttcaatagttacgcttgcttcttcacaccaccagaagctctcttgtaagcctcgctacttactctgcttttcgatatgttttaacgttcaattaattattatgtgttccattataatgattctctaatttttgtcaacgcattttttaatttaaattttgttttatttgggtcatcaatcgttttttattttgcctatctatagtaattaaaaaataattatgctaagattaaaaaataattaaaaagaaattgaaaggggtcatagtaatgacacgaaaagttggagttatcggaatgggtaatgtggggtcaacagttgcccactatattgtggcaatgggttttgcagatgacctagttctgatcgacaaaaacgaagcaaaggttaaggcagatgcacttgattttgcagatgcgatggctaatttgcctttccataccaatattactgttaatgattatagtgcgttgaaggatgcggatgtaattgtatccgcgttaggaaatatcaaacttcaagataatcctaatgctgatcgttttgcggaacttccatttacccgccaagaagtaaaagaggttgcacaaaagattaaggaaagtggctttaacggtaagattgtggctattactaacccggttgatgttattacctcgctctaccaaaaaataactggtcttccgaagaaccatgtattaggaacagggaccctgcttgactctgcacgaatgaagcgggcagtagctgaacggcttaatttagatccgcgttctgtagatggttataatcttggagagcatggtaattcacaatttacagcatggtccactgttcgcgttcttggccgtcctttaactgaattagcagataagcgtggattagacttagaagagcttgataaggaagctaagatgggtggctggactgtctttcaagggaaaaagtatactaattatggggttgcaacggcagctgttaagcttgtcaatgcaattttatccgattcattaactgaattaccggtatcgaacttccgtgaagaatacggagtctacttgtcttacccagcggttgttggtcgtgatggagttgtagagcaagcacaacttgacttgacagaagaagaactgcaaaagctgcaaacatcagccgatttcattaaggaaaaatatcaagaaagtttgcaagcaaaagattaaggaaaatttaaataaagaaaatagactagcataaaaaaattatgcatggtagaattgcttctatacttaacaaataaaagtggcgtcatcagataaatttggtggcaccacttttattctgtaaaaatatagaaaggaaatatatcatgacaaaagaagtaaagcgtataatctttgtagttcttttttgtgagtttttgatttgtctcggaatgagtcttatcttcccagttgaaccattcattaaaaatgaataccactttactgcctttgacatgggagtgatgtcttccctatttgcgtttgtgcaatttattgcttcacccattgttggtcggatttcagataaagttggacgaaagccaatgttagtatggggattgctaatatttgcgattgctgaatttgtttttgccttagcacagcatttatggttatttgacttatcgcgggcggtagatggattatcagcagctatgtttgtgccaacatcaatggcattagcggcagacattactagtgaaaaagaccgcgccaaagttattggttggctatcagcggcttttagtggaggattgattttaggaccgggccttggtggaatgttagcgcatgtaaattataaattcccattttgggttgctggtattctaggcttgattagtacggttgttgcttggcgctttttacctcatgatgaggatgaactatttaagagtgaaactaaaaatcctgaaaatgaactattgactggtggttggaatcagttgaaacaaattatgaccccaatactaatcacgctctttggaatgatctttgtagcttcatttgggttagcaggttttgaaagtatttatagtttgtatgtcaatgaagttcataattttgacttaaacgcaattgcgcttgttttaactctcaatgggattatttcgcttattttgcaagtctttttctttgatcggctagttcgctggctgggagaagttcgcctaatgcgatatagctttttccttagtttagttggaacgatcatggtaatttatgatcacaatcattggcatatcattattgcaaccttgtttgtttttgaagcattcgatatgttacgcccaacaattactacattattaactaagatgagcaagacaaaccaaggattattaaacggggtaaatatgtcattaacgagtgtgggaaatgttattgggcctcttattagtggctatttattagatgtcaattatcaatacccatattggttcgtatcgatattcctaattatttcctgggtaataacacttgttttaggacgggaaagaaaagcagctgctaacgattaaatatttaactttattaagaaaatagcgaggaattaggaaaaataaaatttttctaatttctcgctattgttgtatttatgcttaattttgttgtgcctgttgcaatgcatccttggttgcttctttaatcgcacgacttgttgcactggctccagtaataccatcaacgtctgcactattagctgcaataattttgccgggaagttcatctaaagcccatttgcccatttcagattcgtggtgtttgattacttgtaaatcttgaatcttgtcatcttggtaggttaataagacttttaattcaccaccataagcactaaagccatttccaatatattgggttctttctatttctctcattttattatccatttaaattacattattttgtcctgttacgcagagtgataatagcgggcaagtctgacatttaggatttcttgccgtacagacatacctaccccaaaaaatcatactatgatgagcatctaaccagtgttcagggggaatagttttcattaatttcttttcaattgcaagaacggatgctttgggctcaactattctgagacggcgggcaacccgactaacatgggtatcaactggaaaagcaggaatattaaagcattctgcgaggaccacatcagcaactttccttccgactccagataaggtcattaattctttgagggtgtggggaacctcccgttaaagtcagtaacaatttgttgagaagttttgactaagaatttagctttatttcgataaagccctaatcttttgatataaggctcaacttctgcgggttcaatccctgctaaatctgctggcaacggaaaacgagcgaatagtgctggcgttacttcattgacagattgatctgttgactgtgcactcaagattgtagccaaaagaaagtggtagtttgtgtcagcaatcaaagttgttcctgcttcgggaaatgtttgccgcatgaccttgattgagtaacgaatttcatctggtgataacatataaaatcactcttttcgaatatgattataactattttaacccgaatgattaaaatagcgaagggtaataatctcattttatactcattaaattattatttgtaaaattgagggttagcaatatgacatcaatttatgttaaagaaaaaatgtttaataaagatataattgtagaaatcgctttctttgattaatttaaataaacgattgacctagggaaggcgccttggtaaaatgtattaaagattttcttataattctaatcaaaatttaattattcagaaaaggaggataattatgagtttttggaaaacaattacacgtaaagaagacccgcgtgtttatgataataaagacggtcatttagttcgatctttgaaggtgcgggactttttagctttaggtgttggaacgattgtgtccacttccattttcactcttcctggtgaagtggccgcaatgcatactggaccttcagtagttatctcttttttaattgctgcgatcgtggccgggttagttgccttcgcctatgcagaaatggctgctgcaatgccgtttgctggttcagcctattcatggattaacgtcgtgtttggagaattttttggttgggtcgctggttgggcactattagctgaatactttattgctttggcctttgttggatctggtctctctgctaacttccgggcattatttgttccgcttggctggaagctgcctgcttcattatcaaatgcttttggtacagaaggcggagttgttgatattgtttcagttgttgtaattattttagtagccctcttaatttcacgcggggtatcacaagctgctcgtgttgaaaatcttcttgttattcttaaagtttttgcaattttactttttattgttgttggtttaaccgctataaaagcaagcaattttatgccatttattccacaataccatgaaacagctaatggtgcatttggtggttggcaaggtatatatgccggggtatcgatgattttcctttcctatatcggatttgactcaattgctgctaattcagcggaagcaatcaatccacaaaaaacgatgccacgtggaatccttggttccttagtaatcgcggttgttctttttatagcagttagtcttgtactgattggggtattaccatatcaacaatacgctaacagtgctgaaccagttgggcttgcattacgtgcagctcatcatagtggtgtagcaactgttgttcaaacaattgctgttctaggaatgtttaccgccttgattggaatgagtatggctagttcgcggttgatttactcatttggtcgtgatggaatgctgccaaaatggcttggaaaacttgataaacataatcgaccaaaccgtgcactttggacacttacaattggtgttgttttgatcggtgctttcttcccattcgcctttctttcccaattggtctcaactggtacgttgatcgcctttatgtttgtttcacttggtatttatgcattacgtcgtcgtgaaggaaaagatattccaaatccttcatttaagatgccattctatccagtattaccagctcttggttttcttgcttcattacttgtgtttatgggattagattaccaggcaaaactttacgctggtatctggtttgtctttggcttaattatttactttgcttatggaatgcgtcactcgtcaatggcaaagaaagaagatgaacaaaatgttaaaaacgaaactgaagcaggagaaaacaaatagagatgttttattagaagaaaaaaatgcatttgcaactgctgcccggattaagtactacgatattgtattagatcatggacggggggcaatggttactgatattgaaggaaatgattatatcgatttgcttgccagtgctagttcgactaatactggtcatgcgcatccgcgagtagtgcaagctattcaagaacaagcagctaaaatgattcagtatactccagcgtactttgctaattcacaagcagcgcggttggcacctcgattagcagaattagcgccgataagcgggccagttgaaatggtatggggtaattctggttcggatgctaatgacgcaattattaaatttgcgcgagcatatactggacgccaatatattatttcctttacgggggcctatcatggttcaacttacggttcaatgagcttgtcaggtgtttcattaaatatgacgcgaaaaatgggcccaatgctaccaggcgtagtaaaagtaccattccctagtccctgggaacgattaactaatgaaagtgacgaagcgtttgttgagcggatgtttcatcaatttatgctgccttttgaaacttatttgccagttgatgaagttgctgcaattcttattgaaccaattcaaggtgatgggggaattgttaagactcctcctgcttatatgcaaaaggtatacgaatttgctaaagctaatggaattctctttgccattgatgaagttaatcaagggatgggacggactggtaaatggtggtcgatccagcattttgggattgaaccagatttaatgtctgttggtaagtccttagcttcgggaatgccgcttagtgcaatgattggtcgtaaggagattctggaatcattaggtgcgccagccaatgtttacactacagctggtaacccaattacggctgcagcagcgaacgcgaccttagatgttattcaaaatgagcatcttttagaacgttcacaacgccttggcaaaaaagcagctgaattttttaagcttgaacagcaaaaatatccttttgtgggtgatgttcgaatgtatggacttgatggtggtattgatatcattgatccagttacgggaaaaggtgatacagaagcaacaaccaagctaatgtaccgcatctttgaattaggagcaattatcattagtttacgggggagtatacttcgtttccaaccaccattagttattacagaaaaagaattagatcaagcttttgcgatgattgatcaagcattcgcggaattagccgctggtaaattagcagctcccgcaaatgcagaagagttaggttggtaactcttgcaatttaagaccatcttcgggtatactttaagcgccatcttagctcagctaggtagagcacatccatggtaaggatgaggtcggcggttcgaacccgctagatggcttaaaatgaactaagaaaagagatttagaaaaacgattcgtttttctaaatctcttttcttctttataagaatatgaccttgctagtaatataattaggattgaaattacggctatgttaaaatcaaaattatgtagcattagcttaattgataaattggaggaaaagaaatggaatttattgcagtgttggcggggttattgcttgcaacccagatcgtagcacacttatgtcgtcgcgttgagattccagaagtgattggacaaatcctagttggaatcattgcaggacccgctgttttagattgggttcatctaaattcaatgatgaatgaatttcaggaaattggggttattatcttgatgttcatcgcaggattggaaagcgacctatccttactaagaaaatacttgaagcccgctgttgttgtggcgcttttgggggtaattgttcccattgtaattatgggaccagtaagttatatgtttggctttactaagcttgaatcactttttatcggggttatttttgcgacaacatctgttagtatttcagttgcagtattgcgtgaatttaatcgcctagatagccgagagggggcaacagtgcttggagcagcggttgccgatgatattattggtgttatcttgttaagtgtgatgattagtgtaatcaatggaagcagcaatagtggccacggcaatggtcagcctttaggaattgtcctcttgatgcagttagtgttctttggtggaacttacctattaattcgttggttagcaccttacctgattcatatgagtgatcgcctattaacagttgcttcaacgtcggtaatggcgatgattatctgtttaggcatggccgcaattgctgattatgttggcttgagtggggctgttggctccttcttcgccggaattgctgtggctaacaccaagcataaagaagttgttgaccggagttttattccaattggatatgcaatgtttattccgctattctttgtcagtgtaggcttgaacatgcgctttgataatattggtgaatcgtttgtctttgttattgtaatgacaatccttgcatgcttaacaaaactgcttggatgtggagcgggtgctaagctatctggctttagcatgcccagttcttatattgtcggtagtgggatggttgcccgtggtgaaatgggattaattacagcccagattggttatgaagcacatcttctttcgccaatgtattattcagatgtaattaccgtgattattatcgcaactgtattagcgccatttattttaaagaatgcattgaaacgatcagccaacgaacttgagtaaagggggcttttgatggaaaatcatgaacgagaaacggagcaagcgcgggttgataatgttgaaaaacaaattgaccaacagatagctgctaccactaaagctgttgaagatgctcatcgtgaaacacgggcagttgaacgtaattatagtgaaaatgcatctattaatcgttatgaagttgatgatattgctgaatctcggtcaatgattgaacagcagcgacaattggtttcacgagcagcggaaagtgaatcaattctaaagcaccagttaagaactttgaaaaacttaaaagggtcaccgtattttggccggattgatattcaagatcctggtgaagataagagtgaaacgctatacattggtacttcttctttaatgaatgaagataaaacagactttttaatttatgactggcgggcaccgatttctggggtttactataatggtacccttgggaaagtcaattatgaaacgccagctgggatgcaaaccacagaattaaaaaagaaacgccaattcactattaaggatggcaagatcactaacatgtttgataccaatgaaacggttggtgatgaagttttgcaagcagctcttggaaagcaaaatgaccagtatatgcataatattgtggcaacaattcaaaaagagcaaaatgatattatccgtgatacgcgtagtgatcttttgctagtacaaggagtggctggttcaggaaagacttcagcgatccttcagcgaattgcatacttgctttatcatagtcgaacagaattgaatgcggatcagattgtcctctttagtcccaataatttatttagccactacatttctgaagttttgccaagtcttggtgaaagaaatatgcggcaagtaacattagaagggtttatccggcggcgttttgaaggcttgcaagtagaaacattatttgatcgctatgaagaacggcaaaaacctgaaaatgcttctcatgttgttgctgactttattgaaagtgaatcttttatgacgtcaattgcacattatgtcgagaaaatgacaattgaggatttgcagtttgctgatattcgttttaatggtcaagttttcttttcagctgaccacgtcaaagatctttataaagaattaccattgacgatggctcctgctgataagttagttcaattgaaaaataagttaattcgtgaattacagcggcgagttaaagatgaagctaaaaaagattgggtagctaaagaactggattcacttgatttacaacaattgcacaatctttgtggtaagaagtcaattgatgactttaaggatgaagatgagcaatatgtttacctttcgcggcgtttagctaaacgacgcttacgtgtgattgcagatgcgatctataataattactttctcgatttttataatcaatataataagtttttgcatcaagttgaggtacctaagacaattagtcagcgggaatgggcaacaatgattcttgcttttcaagatgagattgaataccatcggctggaattaatgcatgcggcacctttgatgtatctgcgtgatttgatttccggtacaggacaaaatcgttcttttcaatatgtatttattgatgagatgcaagattattcaacagcgatgttaatctacttaaaacacgcctttccccaagctaagtttacggtcctcggtgatagtgaacaggctctttttaagccattgcagttaccggaagagttattaaacaaacttagtgggatattaaaggctaagcggcctaatttaattgctttacggcgaagttatcgttccacgacggagattactaattttgcgaaggccttgttgccggatggagataagataatttctttcactcgccatggaaagaaaccacgcttgttagttcgttattctgataaagagagtcagcaaagcttgttagatgagacacttaaactagctaacgaacatgaaactgtagcgatcttaaccaagaatcaagagcaagccgctgttatttatcaattacttcgccggcaaaaggttgaaaatattcatctcttagataaggatgcaagtgaattgccaaaggggatcttaattctcccaatttacttagcaaaaggactcgaattcgatgctgtccttgctgcggatgtctctgctaaaaacctagctaatactgatgaagtcggtatgatctatacaatggcatcacgggcaatgcatgaactggtccttttaagcaacggttcagttagcgacgcaattaacgagaaagctgggcgtcttttaacgattgaatatcaattgccaaataaaaattaaatttttctattgtctaaaaacgctttcaagaagtgtcgacttatgataatctaatggagtagatatagaaaaaggagatgcttcgccatggttaaagacgaatacacacttgtactagtaaagcctgatggggtaaagactcgtcatattggagatattattacccgtattgaacggaaagggtataatattgaagctcttaagatgattgacccatcagaaaaaaagcttcgtcaacattattttgataaagttgacaaaccattcttccctgaattgttagaatacatgacagaaggaccaattgtcggaattgttgtttctggtactaatgtaatccaagcaattcataacatggcaggagctactaaccctggtgaagctgaatggggaacaattcgtggtgactatggtcgtgaatggcctgatggtaacttgcgaaatatcattcatacgtctgataacgttaacagtgccactcgtgaaattggtatttggttcccagaatttgatattaaagataaacagtagaaaataaaaagactgagagaaaatttttcctctcagtctttttacttttcacttgccctttgttggcgtttaatttttcgttgtactgccaaggtattgcgttcccagaagactccgtcagtgtagccttggatgctaggatcatcttttatttgattaagtcggtactgtccccatgcacaatatagaagactttgctcgattccaagataacggcggttaagtttagcagcagtcactaaactcgaaccggaaccagcaaaaggatcaaaaatgaagtcattaggattagaactggcaaggataatttttgccagcaatttctcaggcttttgcgtagggtgaccagtattttctggcattgaccaatacggaattgaaatgtcatcccaaaaattagacggcattgtatcccgaaagttaccatttttagtagcttgccagtctttagctaccccatcttgacgataaggagctaccacctgtcgtcgttgcttaacttggtcgacgttaaaggtgtaatcactcgggttcgcggttaagaaccaaatatcttccatcccatttttccaatttttcagtgaaccccggcccttttctcgttgccaagtaatccgattttgaattgtaaaatttttttccaggatcggtgctaaggccatgctggttgcccaatcagaaaagacatagatactagcattttcttttaataatggttttaagaggtcaatccacttttgcgtgtaagcttgatattggcttgtggacatttttttaaagcttaaaccatcatactgtttattaaggttgtaaggagggtcaataagggcgagatcaacctggtgtggtgataatttagtcattaccttgaaggaatccccgttgataatcttatcggatattgtctggagattatcagtaggctgaataatttggttgaggagctcaggtgaagcttcctccagcgtgaaatcgattgttttatttctttttgagcgcatatagaccactcctgttcgacgtttaatattattatacttgtcatattcaggattgtcttgcctttttagtaggagttggattaaaattaattatattaagtagcgcgagccttagcgaggggcggtcggtgaaaaggtccccaaagtgcgaaatggtcacaacaagatacacaatgagcggcaataatgattgcaatttaggtggcaccgcgcgaaaagcgtcctatttagtttatacgactaagtagggcgttttgtaatttaggaggaatttaaaatggcagaagaaaaacacgttattttaactggtgatcgaccaactggtaagttgcatattggacactatgtaggttcgttaaagaatcgggttgaattacaaaatacaggtaaatatgatacatttatcatgattgctgaccaacaagcattgaccgataatgcccgggatccggaaaaaatccgccgtaatctccatgaagttgctctggattatttggcggttggaattgatccaaagaaatcaacaattttggttcaatcacaaattccagcattgagtgaattaacgatgcactaccttaacttagtaactgttgcacgtttacgccgaaacccaactgttaagactgagattaagcaaaagaagtttggtgaaagtgtgccagctggattctttacttacccggtaagccaagcagcagatattacagcatttaaggctgatacagtgccagttggtgatgaccaagaaccaatgcttgaacaaactcgtgaaattgtgcggacattcaaccgtatttaccaacaagatattttagttgagcctgaaggggtattcccaccaaagggtcaaggacggattccagggctagatggtaatgcaaagatgagtaagtcgcttggcaatgcaatttatctttctgatgatgctgatacagtgcaaaagaaagtaatgtcgatgtatactgatccaacacatatcaaggttagtgatcctggtcacgttgaaggcaatactgtctttacttaccttgacatctttgatccagacaaagagcaagttgctaaattgaaggagcaataccaagctggtggccttggggatgttaagattaaacgctacttaaatgaagttcttgaagctgaactttcaccaattcgcaagcggcgtgaagagtatgcagctaatattgattatgttgatcaagttcttaaagaaggctcagcacgggcaaatgaggttgcaaaccagacgcttaaagaagttcgtgatgcaatcgggattaactactttggctaaaaatataaactaaaaaagcgaggctgctaggaaaataagtttttacctgagccccgttttttttcgtgtctcccatagcagaacatggtaacataaaagagatgtatttatacgaaaaataattaattaaagcggaggtgaaaatggtggaaaacctcgcgattgtagacctcggctcaaactcggcccgaatggcaataacagaaattgctccagatggacgatttcgtgaaattcgacgtgtaaaagaaaatacacgtttatctgagggaatgggacgagaaaaaatgttacaagagagtgcaattgaacgcacaattgcggctctaaaacgatttaaaaaaatctaccaagagattcccaatattaaagttcgtgcgatcacaactgctgcagttcggcaagcacgaaatcgtcaagagtttttgaatcgtgttcaacaagaagtcggtattcatctacaagttttatctggtaaaaaagaagcctattatgattatctaggcgttgttcggacattgcgacttaaccactgtttgattctagatgttggtggagcaagttgtgaattgatattggtgcaacagcgaaaagcacgtaatttgatttctattccggtgggagctgttaatttatcagaacaataccacttaaatggctatgttcgttcggctgacctttttcgtgcgcaggtagcgataaatgaacgattgaccaaaattccttggttacgatatacaacgcgtgttccgattgttttattaggtggtgctaaccggactttggcgcgtatgactcaatcctatcatcaccatcaccgccgaaacggttcgattcatgggtatcaactctcctcacgagtagtatttgcgacttaccgtgaattattaaatcggaacttggcccagcgtaaacggctgactggtctagaaccggaacgagcagatattattattggtggaatgctgcctcttgtaacccttttgcaacgcaacagtgatggccgggttattttttcagagagtggtgtccgcgaaggaatcatcactgaatatgtaaatcaaaggaagcgacaccatgactgattggcaacacggtttttataagttatctgccgatgatcgacgtcaacaattagcaaaagctcgtcacctatcccctatggaagagcaagtattagcaaatacaagttcagatttaggggatgagttagtcgaaaattatattactgattattctttacctgaaggagtagccttaaatataaccgtaaataatcgtccgtatgttgtaccaatggtgattgaagaaccatcagtcatagccgctgctagcaatggtgcacaccgggtaagtaggtcgggaggatttactgctcctcggcaagaccgacaattagtggggcaagttgtgttagatgatgtgaccgataaagcagcagttaaagcatggttattagaacaccaagatgagattttaacaattgctaaccaggctcatccctcaatgcaggcacgaggtgggggtgcgaagtcgatgaaagttcgcactcctgggaactttattagcattgacctggggattgatgtttgtcaggcaatgggcgctaatagtgtcaatacgatggcagaagcggttggaaaatggttaacagaccagggcttccatgttattaccgcaattttaagcaatcttgcaacgcagagtctgcaagccgctacttgtaaagttgattttcgatacttagcaactccggagatggatggtaaagaggttgctcaacgaattgctcgtcttagtgatcttgcacaagttgatccttatcgagcagctacccataataaaggaataatgaacgggatcgatgcggtcatgatcgccagtggaaatgactggcgggcaattgaaagcggggcccatgcctatgctgctcgtgatgggcaatatcgaggattaagtacttgggaaattcaggacgactacttggtaggaaaaattgttcttcctttaccagttggtgtaattggtggttcaattggattaaataagatgacaaagataaactatcatattagtcaaattaaaagcgccgaagagttagcagcagtaacagcaagtgtcggattagcacaaaatttggctgctttgcgggcattgacaactactgggattcaagctggtcatatgaaactccaatatcgctcattagcggcaagtgtcggagctacgccagcagaagtaccgttagtggtagctcaattaaagcagcaatcacatgttgaccaagcacttgctaaagaaatattatcaacgatcagaaaggaccaagttaatgactgaagagagaattacactaaataaagaaaatcaagcactccttgatcaggttaacagtctatatcctgaaggtagtgtctttgttcagtttcatggtgacaagtcaggatacgttcgccatgaccaagcaactcaacaaactattcctggtgccttggttattattgtgactgacttaactgccccaaattacactgcttcacatgagttattgcaccttttgatgttgctaaaagggtttccacaaatctttttccaactatctcttggtgataaggaactcgatgaacagatgatgattatgtcaacggatttgtataatattgccatgcatcgagtagtggttgcagaacaacgtaagcatggttttattaccgatgagattgaagagcagtatctaaaggggattgaacacacattaactccggaaaaagaggaagatgatgaacggacgttacggttgttaacccttttggatgccttggtcttttatggtgatcacctctcaaagtatgaaaaaactttagcagaaaagtacccgcttgcactgaccgcggcaaaaaagatgtatgctgagattacaaagaagccaattaagtcaccattcgatatgcgccggtcaattgttaagatttattctttgtttgatcaacaaatgcaggaatggggcttaccagccttacataataatgaatatacaactctctcaccggtattaagtgcccggcaattacgtttagagatgcgtcaagtttttgaaatctatcactctgatatgaaagaacgggggacagataagcgcgcctatgttggtcttcggcggagtgatggtcaaaattcgtttactcttccggcaccggctcaaaatgcgccagaagaatttaagaagatatatgatcaaccagtgaaggaatttcttgaacagaatagcattccatacattgtaaggaagtgagttagatggatgcgacgattcaaaaaacatttgacgacgcaaaaaatattgtctttctaacgggagctggtatctcaactgcttctggtattcctgattttaggtcagcaaacggtttatatacgcaaaatcggaatgccgaatattatttaagtcaccgttattttgctagtgatccagaaggcttttacgaattttgcaagcagaatttatattttccagatgcaaaacctaacgtaattcatcaaaaacaggcagcgttgacgcaacaggatcgcgcgacagttataacgcaaaatattgataacttatatgaagaagctggaacaaaacacttaattgattttcatgggaacctcttccacgtttattgtgaaaagtgtcatgaaacagttccggtgagtgaatatttgaatagtcgcttgcatcaaaaggataatggtcccttgcgtccggatattgtgttatatgatgaaggaattaagcaagaggatattgtcaattctgtcaaggcaatgcaacaagctgatttagttgtgattgtgggtacttcgatgaaagtatacccatttgcgggcttgctagattaccgcaatccaaacgcaaaggtgattgctgttaatcagcagttattgcaatttccttttaactttcaaatggttcaagatgacgcaacaaaattctttgacgaattaaaagtataaaaaagaagctgcagttgtctgaggacaatttccagcttctttttgctccagtagttattcaaagaaaacgaccttcccatcaactttgaatgggagtgctactaaatgagaacccttctttttagtagtagccttttcttgataaaaaatgtgacgaatacctttgttctttagtagcatttctgatcgctcctttcatattgttcacttgtaaaataacatgttttgaacgttttccctagagaaataatgaagtatgagaaacgatttcattttaatgggtgaaaatgatgcataatccgttcgttttttactacaaaaatgaataaaagcgataaaaacaacgattcaagtccttgaaaaatgaatatagatttattttgtagtgtataagaatttgctaagtaatttgatgaggattttggggtacgaaagagaggattaaagatgaaaataacgatggggatgacaacttggacagagcatccagtactcattcatgatgaacaacgcccagtaaggcttgatgagtatgctcaacattttccagtcgttgaggtggatacttttttctatgctttacctcagatatcaacgattcaaaactggcttgctactgttcctccaacttttcagtttatcgttaaagctaaccagaaaatgacactgcatcagcgaaaccaggaacgtggcgaattagaacaggtctttcaacaatatcgccggataatctcccccttggtagctgctggtcaattaaagacgatattatttcagtttcctccatattttgatgcaactgtgcgtgatttttcttacttacgattaattcgggaatggttaggaaacttgccaattgcagtcgaatttcgtaatcaaacttggtataagaaagaaattttaccgtcagtcttagacttctgtcgtgaactcaatttcacattagtggccgctgatgaaccccataatacgccaacgtcagtaccatttgtgcttgcaacaactaatcccgacttagccatgctgcgccttcatggtcgtaatcgcaaaggatgggaaaatcaaggaaaagaatggcggaaaacgcggactttatatcgatattcgacggaagaactccaattctttaaaaaacaaattgagtccttgcagccgcaacctaaagaactctgtgttatcttcaacaacaactcagctaaagatgcagcacccaatgcattgagtcttcaaaaaatgatgaatattgaattcgagggcctggcacctaaatcgccagaacagcttgatctgttttaggatggagcaagccctaataaaatgctatactaaatgttaaatcttaattagtaatatcttagaaagaggggcttcatatggctgaacaaaaaccaacttattacattacaacaccaatttactatccatctggtaaactccatattggtaattcgtacacaacaattgcatgtgatgcggaagcacgttttaagcgtttgatgggttatgacgtattctacttaacaggaaccgatgaacatggccttaagattgaacaaaaggctgaaaagctcggcatgaagccacaagaatacgttgatcaaatggctgcccaaattaaagagctatggaaaaaacttgaaattacaaatgacaagtttattcggacaactgacgactaccatgaaaaagctgtccaaaaggttttccaacaattgcttgaccaaggggatatttacaagggtaagtatactggttggtactcagttgatgatgaagaatacttcacagaaagtcagttagcagaagtttaccgtgatgaagacggtaatgtgatcggtggaaaagcgccatcaggtcatgaagttcaattagttgaggaagaatcatacttctttaagatgagtaagtatgctgactggttaatgaactactataaggaacatcctgattttatcgaaccgcaatcacggatgaatgaaatgattaataacttcttaaagccagggctagaagatcttgcagttacgcggacatcatttgcctggggggttaaggttcctaatgaccctaaacacgtggtatacgtatggattgatgcattatcaaactatattactgcgctaggatatggcagtgatgatgatagcctcttcaagaagtactggcctgctgatgttcacatggtaggaaaggaaattgttcgtttccacacgatttactggccaattatgcttcatgcgcttggcttaccattgccaaaacacgttattggtcatggatggttaacaatgcgtgatgggaagatgtcgaagtcaaagggaaacgttatctatcctgaaacccttgttgatcgttacggccttgatgctacacgttactacctattacgggcaatgtcatttggtaatgatggcgtctttagtccagaagactttgttgataaggtaaactatgacctcgctaacgatctaggaaacttgctcaatcggactgttgcgatgattaataagtatcaaaacggcaaattgcttggtactaatgatgcaactactgattttgatgctgatttagaacaaactgctagtgatgtaatcgctgagtataaagaactgatggacaaaacacgatttgctgaagcattggcagctgtttggcagttggttagtcgtgctaacaagtacattgatgaaactgaaccatgggtattagcaaaagatgatagtaagaaggatgtattatcagatgtgatgacccatctagcaaagagtttgcggattattgcagccctaattcaaccaattatgccgcatgcaccaaaacaaattgttgaacaacttggaattgaagggactgacttatcattaaccgatcttcaatttaatgatttcccagcagaagctcaggttgtcgccaaaggaactccgatcttcccacgattggatgtgaaggccgaggttgaatttattaagagcaagatgacagtaaacgaaaagaagaagggaagaaaggcaatggctgaagcaaaagaaaaagcccaggaagcagcacaagaagaaaaagcagatggcaaaaagccaattcggattgatgtctttgataaagttgaattgaaagtagctcaaatcactgctgccgaccatgtagaaggtgctgataagcttctgaaattccacatggatgatggaacagaagaaggtcggcaaatcctttctggaattgctaaatggtatccagatccttctgttttagtaggtaagaaagttttgattgttgctaacttgaaaccacggaaaatgcggggcgaattaagccaaggaatgcttttgtctgctgaaaaagacggtaatgttcaagtagtaactgttcctgacaatttagtacctggaatgggcgttgaataaagtgagtaatcatcaacaccagcaattggtttatgattcccatacccacctaaatgacgatgtgttttatgatgatgtgcctgcctttattaaccgtgctgctcattatggcgtgacggagatgaacattgttggctcgaaccagctattgaatactcgtgctttaaagttgggacatcagtacgataacctgcatccaattatcggttggcatccagaagatattgctaattggaatagtgaaaccaagaaagaattacgccaacaattagcagatcccttagtcgtgggaattggagagattggcttagattattataatgacgagcattctcctcaccagcaacaacaagaaatttttgctgaacagcttgagtgggcgcgagaacttaaattaccggtctcaattcactgccgggatgcactagctgatgcatatgaaattttgcggaatgcccacgtcgatgaatttggcggggttatgcatagttttaatgggacttcagaatgggcagagaaatttatggatctcgggatgatgatttcatttagtggtgtcgtaagctttaaaaatgcgacagaagtccatgaagcagcattagttgttcccctggaaaagatgatggttgaaacggatgctccttacctaactccgctcccataccgaggaaagcaaaacgaacccggttttactaaatttacggtggatgcaattgcagatttaaagcaggttgatgctggcaaagtggcatataaaacatttacgaacgctcgccacttatttttggaaaatgaagaaagaggcctatgattagaataaaagaagttatagttgttgaaggtaaagatgatactaagcaaattttaaaagcggttgatgccgatacttacgaaacaaatggatctgcaatttcaacggctgacttggcaaagttgaaaaagttacaagcaagccgaggcctaattgtttttactgatccggactttaacggggagcggattagaaaaataatcagtgaagccattcctggcgttaagcatgcttttattaaacgaaaagatggtgtgccaactgaggctcacggtagcttaggggttgagcatgcaacgccagcaattataaaatcagctttggagcacctttatactcaaacaacgacacctcagcaagtttttaagcgagaagatttgcaaaaatggggattaacaggtcaagcagattcacgaaaacggcgtgaaaagttagggcaattactcggaatcggttatggaaatgggaaacaattgattcaccgtttaaacatgtttcaagttgaccgggcaacatttgaaaaagcgattaagcaaataaatcaggaggcagatcatgagtaattcaccagaaattggtagtcgaacacgtacccgcgcgataatggaaaagtacgggatccgaacaaaaaagagtttcggccagaatttccttactgatttgaacgtcttaaaaaatatcgttgaggcagcagatattacagctaatgacaatgtaattgaaattggtcccggaattggtgctttaacggagcaattagcacaagcggcgggagaagttttagccttagaaattgatcaagatttaattccggtattaaaagaagtattatcaccatatgataatgtaaaagtgattaatcaagatgtccttcaagctaatttaccagagttaatcaaaaaggaatttaaggatcctagtcgaccaattaaggtggttgctaatctcccatattacattacgagtcccattctaatgaatttgctggctagtcctgttgagtgggcgacgatttgtgtgatgatgcaaaaggaagttgctcaacgactcactgctaaaccaggaactaaacaatatggtgcgttgacattagcgattgaataccaaatgcaagctaaaattgcttttgatgtttcacggaaagtattcgtgccgtcgcctaatgttgattcagcaattgtggtattaacgccacggacaaatccgcttccggttcagccttttgataagcaaaaattatttggctttatccggggatgctttgctcatcgtcgcaagagtctttggaataacttgcaaagtgtaattggtaaggatccagcggtaaaagagaaaatgactgctgtcttagctcagctggatatttcgccacaaatccggccagaaaaattaaccctcaaacaatttattgaacttgcgaatgctcttcaccggcaaaatctcttgtaaaagatggttgaccgttataaaatattatggtacaattttgatttttgtgtaaaaaaagagtatgctagtctacagtgaggtgaaggagtcgtgcctaatagcattgtagaaattaagaagaagctagatgaacggattggcgagcatgttttagtaaaagcgcaagctggacgtaaacgtattaccacccatcacggtattttaagtaagacttatcctgcagtatttgttattcatttaaatgatgaacaaggaacattggatcgagtttcctatagttatactgatttgttaacacgaaatatttcaattgccttcgatgaagcagaataaactgataatttaaaattcatatttataaaataataggagtgagtaaaaatacctttcaacaggaaggcagtttttattcactccttttgctttaggaatagttaggaaacagtagttgcaaggattatagttccgttagtataatttaactaactaaattattacaaataaggagggttgccggatgatagttacagaaaaagcaccagcaaaattgaatttgagtttagatacgccgatgcgatattttgatggttctcctcaatgggatatggtaatggtctcggcagacctggctgattatgtaactgttgagacacaccggcgccctgcaacaattaaagtctatacaaatagtggctttttacccaatgaccaacgtaatttagcataccaagcagctcatattttacgtagtcgttttcattgtaaagatggcgttacaattcggattaagaagcaaattccagtcgcggccggattgggcggtggctcttcagatgcagcggcagttttacgcgcattaaatagtatttggcggttgggcttgagtttatcagaactagcaaagatcgcattaacaattgattctgacgtcccgtattgtatatataacaaattagcccacgttactggccatggtgaaaaaatcgaattgttaccaccgcaacctcattattgggctgtaattgcaaaacagaagatcagtgtttctacgccgcaaatcttacgacaaattaattatgagaagcttcaacatcttaataatgaagcattactgacaaatttaaagaaagaagattggcaagaagcaacaaaatatatgggaaatgttttagagcccttaacgatgaaattttatccagagattggtcgtctaaagaataagatgaaagaattgggggccgatgttgcccagatgagtgggacgggaccaaccgtcttcgcaatctgccatacagaatcgcgagcaaaacggattcaaaatagtatccggggattttgtcgcgacgttcatgttgtaactttgctttgattatatttaaggacaagaggaatgaggctgagagaaaacttttgttttctcccagcctcaactgcttttatgaacaatagtaagataacgtgaaactagcttcatgtcgccacaagactcgaggctaagtacgaacgctaatcagcccgtgccgtgctaatcatcgttctagcttagcccaccgccttgtcgaggaggttattttccactctcctcttgtcctttttatttttatagttgcaatctagcataaagttcgatattatattcattgttctaaatagtaatgattacgattaaagaagagggaaagaatgaaaaaatatattatcagtattagtagtattgttgctttgttggttataattcttgggttatcctttgttccgtggaaatcgatggggaaaaatcaaaagccaattagagtggtaactgggatgaatttctatggtgaagtagcgcagaaagtagctggcgatcatggccaagtgatttcgtttattgataatgcttcggttgatcctcatgattatcaacccaatactaagcaagcccagcaagttgctaaagccaatgtagtaattgaaaatggtcttggttacgatagctgggtaaacaaactcgttaaatcaagcagtaaccataacaagattaaagtaattaatgtagcatctttaaccggcaagaaagatggcgacaatgagcatatttggtatgcacctgagacggtcgaaaagttagcaaatgatcttgcaactcaatatggtaaaattgatccgcaacatgctaaggattaccaaagaaatgcacgcaaatatttagcttctcttcaaccgcttaatgaagaaattgcgaaagtaaagcgccaggtaaatcctaataataatcgagttgcagtcagtgaaccagtttttgattatgccttagagaatgttggttatcaaattatggacaagcattttgaaaaagcagttgaagatgggaatgatccatcaccaaaagatattgaagaaattcaacaagcaatcattaatcaccaaattgccttctttgttgataattcgcagacaagtgataaagttgttgataatttagttaaacttgcccatgaacataatgttccagtattaaaggtaacggaaacaaagccgaatgggtatgactatatgcagtggatgctcaagcaataccaagcattgtctcgcattcaacaaaaggagaattaagaagataatggcagttgtatcagttgatgatttaacgatcgcttatggaaatcatactgtaatcgatcatttaagcttctccattaatgaaggggattttcttgtcgtggttggtgaaaatggggtcggaaaaacgactcttgttcgctcaatgcttggttttttaaaaccgaaaagcgggacaataactattccgcaaagtacacgacttggctacgttcctcagtttcgtaatattgacgaggaatacccgctatctattcgcgattttgttgctttaaatactaaaccacgccttttgccatggctgactaaaagcgagcgaaaccgtgttgaacggatgattcgtgaaaataacctaacaaagattgctgagcggccccttggtttagcatcagggggtgagaagcaacgagcatatcttgctcaagctttattacccaatccaaatctccttattctggacgaatcgacggcaagtctggacaatgaaatgaagtatgaattgctagacctggtaactcgttttcaacaaaatggtttgagtgtaatgtttattactcatgattgggatctagcaaaacaatatggaactcgtttcttgtatttatctcccggttcttattccactgggccaattaatgagttacccagtccggtaaagggggataaaaaataatgttaactttaagttttatgcgtcatgcatttgtcgctagtacatttattgcgattatttgtggaattattggagtttttgtcgttgcacgaaatttatcattcttaacgcataccttgtctgaaattgggtttgctggtggtgcttttgccgtttttgctggatggccagcactaaatgggatgattctgtttacaatgttaagttcagttattgttggacaaatgagtataaaagaatcacgacgagaagcggttattagtgccgtttcagcgctgttcattggcttaggaattcttttcttatctttgagcagtcagtcagctagctcagcaacaagtattttgtttggtagcgtggttggaattagtttgaatgaggtctggcagcttgtctacctttccattcttgttttaatcattttgctattgatgtatcgtcgccttaagtttgattcctttgattcaattggggcacaggtcagtggaataaatcaaacagtgatttctgttatttttcttttactacttgctttaagcgttagtgtcgctgctcagattgtcggttctttgctaatttttattctcctaacgttaccagctgctagtgctaaatactttacgcatggtgtcgcacggatgattattttagcgattttattttcactgttaggaacatggcttggtctttttctcggttatttgacagattggccggttagtttctttatcgcagtgattgaagttatcatctataccacagccttgatttatagtaaatttatcgaatcgaattagactgtggcttaagtagttaagcaggtaaacaacatagtacaacaatggtcttcaacgcccggcaaagtgttggagactattattatttgcggggctttcagatgctagcttcgtggtgacaaaacgcccccctatctcggactctttttcttcagtaaatactaaaatttttgccgaaaatccgaacattttatgttaaaatcaatgttaattaatcctttttgaaaggcagagaaagaacatgaaaattagacggagtaaccgattggtggatatgacacgttacttgcttgaacatccgcgatcattagtatcgttgaaattttttggtgagcgatatgactcagctaagtcatcaatcagtgaagatttaggaattgttaaacataccttccaaacgtggggacagggacgattagaaacaattcctggtgcaagcggtggcgcgatattaacgccattttattctaaggaaaatgctcaggcggccattgataacttggttgaccgggttaatgatgactcgcgtttgctaccgggaggttatgtttacttatcagatttaatcggccaaccggaagtcttgcggcagattggtaagttaatcgctactcaatacgttgatactgatgttgatgttattatgacagttgagactaaaggaattccgattgctcaaagcgttgcgatgtatatgaataaaccatttgttattgttcgtaatagttcacacattactgaaggacctactgtaagtgttaattatgtttctgggtccgtccaacggataaagaagatggaattgtcccgtcgtacattatcagctggggcgaatgtcttggttgttgacgactttatgaagggcggcggcacgattaacggaatgaaatctttgattaaagaatttgatgctaacttggttgggattactgtttttgcagaaggtcgtccggtaaatgggcaacggttagtcgataactgtacttcattaatcaaagtggaaactaaagatggtacggagaagaagattgcagcacaagcaggaagcttcatggaaaacgtgtttgataagaaagtagagaattaggaaatgacaaaacgtaatgcaattattttagctgctggtaaaggtacacggatgcgctcaaagctatacaaagttttacaccaagtttgtggtaagacaatggttgagcatgttttaactcaattggaaaaagccaaaatcgataatattattacaattgttggttttggggcggaaacagttaaacaacgattaggacaccgtactaaatatgcgctgcaggaacaacaactcggaactggtcatgccgtaatgcaaacaaaaaaccttcttgcaaatgaagatggtgaaactattattgtcagtggtgatactcctttatttacggctgagacttttgaaaagctttttgaatatcatgaacaacggcatgcggcggctactattttgacttctattgctcctgatccaactggttatggtcgaattgttcgaaatgatgttggaatcgttgaacgaattgtggaacaaaaagatgccactattcaagagcaggcaattaaggaaattaatactggagtttactgctttgataacaaaaaactatttgctgcccttagtaagatcacgaatgataatgctcagggtgagtattatttaactgatgttattggtattttaaagcaagaaaatgagatcgtaacagcctacaagatggataactttgacgaatcgatgggggtaaatgaccgagttgcccttgcacgtgccaacaaggtaatgcgtaaccggattaatactcattggatgcgtgaaggggtttcgatgattgatcctgatacaacttatattgatgctgatgttaagattggtcgtgatacagttattgaaggtggcgttgtgatcaaggggcatacagaaattggtaacgattgttatatcggtgctggttcacggatcattgattccaagattcacgatggggttaaaattatttcttctacccttcaagaagcagaaatgcacaatggcagtgatatcggtcctaatagtcacctgcgtccagaagcagaaattggcgaaaacgttcatattggtaacttctgtgaggttaagaaggcttacattggtgaaggaacaaaggtcggtcatttgacttatatcggtaatgctactttaggtaagaatattaatgttggctgtggagttgtctttgttaactacgatgggacaaataagcaccataccaatgttggggaccatgcctttatcggtagtaacagtaacctagtggctccggttaatattgccaaggattcatttgtcgctgctggttcgaccattacagacagtacagaacaatatgatatggcaattgcgcgggcacggcaggttaataaagaaaattatgctaagaagctaccatggtaacttgctttttgcctcactaatttatattatgtaagtggtagtagtataacttttattaatcagcggaggacctaatgacacagcaatattttgatcaaaatttaaaaatctttgcgttaaattcaaaccgtcccttagcagaaaagattgctaagcatgtcggtgttgatttaggaaaattatctgttaatcgttttagtgatggtgagatccaaattaatattgaggaaagtgtgcgaggagacaatgtttatgtcatccaatcgacctctgccccagttaatgacaacttaatggagttgttaattatggtagatgcacttcgtcgtgctagtgccaagacgattaacgtggtgatgccatactatggttatgcccgtcaagaccgaaaagcacggagccgtgaaccaatcactgctaagttggttgctaatatgttgcaaaattccggtgttgatcggattattgcacttgatcttcatgccgcacaaattcaagggttctttgatatccctgtcgatcatttgatgggtgctcctcttttagcagagtattttatcaaccagggtgttgctgaaaatgcagttgttatttctcctgatcatggtggagtaacacgggcacgagcacttgccgagtttttaaaatctccaattgcgattattgacaagcggcgtccacgggcgaacgttgctcaaatcatgaatattattggcgacgttaagggtaagaagtgtattatgattgatgacatgattgatactgcgggaactattagtttaggttcgcaagcattaatagatgccggcgcagaagaagtctacgcatcatgtacccatgcggtattatctggcccagcaattgaacgtttacggaatgcaccacttaaagaagtcgttgtgacggactcgattcaattgccaaaagaaaaacaaatcgataaaatcaagcaggtatcggttgctccactaattggggatgcaatcaaacggattaacgaaaatcgtccggttagtccactatttaagcaagtattccaaagtgcacagttggaaaagaagtaaggcttaagtaaattgagattagtaaataagtagggactgtgacataagtcaagttactttcataaaagacaaatggcacagtacaccaatggcttccaacgcccggtaaaaccgaacgttggaggcctattgttgcttgcggggctcgaaaacgaagtcacaagtgacttctgtctcgcttcctttcttatattccatttctgtatttaaaagaaaataaagatttgggaaagacaaacagtcattatcaattcatgttataatacgatgtgaaataaggaggagaaaaatgacaacaattaagtttttcaaaaaagcaatggttggaacagctgcagtcgctactatctttgccttagctggttgtggtaaacaatctgcgtcaagtagtgatacaagttcttccagcacatcgtcgtctgtccgttcttccgaaagtaaagcttcaaaggcttatcgtacagctaataagcttatccaaaatcatgattatgaaggggcttatgaacagttaaaccaattaaatgatcataatgctcaaacggaagcacttgctgatgatttacaaagctacatggatgcccaaaaagcatatgaaaatggcgattatgatggtgctaagaacaaattgaaatcacaaaagtcaactagtccggcaatgcggaatgcatacgctgatttacaaagcaaggtaagttctgcacagggttctactagttctcaaacttcatcatctactaataatagcaagcaaacaaataagcaatccggttctacaagtgcagcaactcaacaatcatcctctgctgctaaccaagctgcatctgatgcaactagcgataatgtagtacaacaatttgctaacaagatgggcttcagtggctcccaaggttaccaaattatgccaactggtaagactggtaatgtttacaagtttgaagtacgtcaaaacaatagtgataacactgttgctaacttaatcggtatttaccaatacaatagtcaaactggagcggtaacaaaaatcgcttaatatataaaagatgacaaaaataaaagcaagaggtgtagaaagtacgcttcttgctttttatttctgtctttacttaagaacatatttttcaatcgcttttccaacaccatcatgattattatcagcggttgttacgtcagcgatctttaaggtaccaggaattgagtttcccatcgctacccctaacccagcaaattcgatcattgaatcatcgttttgtgcgttgccaagggccattacttcttcttttttaattccgagttcttcgctaagtaattgaagggtatttcctttacttgcttgtttattcatgaattctagataaaagtcttcgctgcgaacaatggaaaagcggtcacgcatttctgccgaaagctctgcccaggctttgtcaatttgttctttagtatcaaccatcattgctttggcgattacgtattgatcttgcattttagaaagttcttcaaaggtacgataacgaattggcatacttacaaggtctgactcgtagactgtataaggactcaaatcccggttaattgtgtagatgtaatctcgcgtttcgatttgggacttgacgccttctttaatacaataagtttgccagtctgcatagtcattgaaaggcatcgtgtaatttaccaggacgttcccactagttgattgggccagtgcaccgttgaagctaataacaaattcgttatctgaatcatttaagcccaattggtcaaggtatgcttttacgcctgtcattggacgtccagtgcataagacaatctttactccctgcgcgctggctttttttattgcagcaacagtttgtggtgtgatttcacgttggtcattgattaatgttccatcgatatcgattgcgactaatttaattgccattatttttgctcctttgggttaataatatgattattcttgatatagctttgaaattcttcatagattggttcgaaaatttcaatattgtttcgcgtttcaagcatctcttttgggaaaaagaaccgttgatctccggcttctcgtcccgatacgctagcgactaaggtactaacttgggatagttccacaaaatcgccattaggttggagaagctcgatttgcgtttgagtattagaatcttgtggatgataagtatcatatggaagtttaaaactatcgttgactgcggtgtaatactggctattaaacccagcagtttggatgagctttcgtaaagttggtaaaagtttttgtgtattttgatcataaatgactgatttaaatggtcggcggttaagaaaacgactagcaaggtcgcttaaaatatcatcacgagaatgggtccaatgaataaaataggtggttaagacaccatcgtcaagcgccaaatagtcatccaaggtaaacttaccattaaaaaacggcatcagcatatgaggggtgaagtcgggctcaaagtcattaggatgttggtaaatatattttgcccgcattaagaggtggtctaagataacttccattgaacgggaaactgggtgaaagtagacttgcagatacatttgaaggcgactgataatgtaatcttctaccgcatgcattcccgaaatttcaaaggcaattcctctcttaactggtcgcataacatgaagaacacgatcaagatcaaactttccgtagtttgttcctgtgtaatacgcgtctcgttgcaagtaatccatccggtccgcatcaacttggcttgagatcatttgcaccacttgtggattttcataagtatggtcgatcacactagcaacttgatgaggaaaatcaggggatacccgttgtaatattttattaatattagtgctgctgtcggtgatcaactggcgggtaatttgctcatggtttgtatggaaaatatgctcaaatgtatgggaataaggaccatgccctaaatcatggaggagggctgcacataaggcaactggtcgttcgtgatcatcccataggccgtcgccaggatgctgactaggatagtttcgctggaaatagttgcacatttggcgggtaatttcatagacgcctaagcaatggccaaagcgggaatgctcggctccatgaaaagtaaatgatgaagttcctagctgcttgattcgtcgtaatcgttgaaactcaggagtattaattaggtccataataatttgattatcgacaataatttgtccgtgaattggatcgcgaaaaaccttttcacggcgaagtttttcgtcataaaagtgattcatattaatcttctttctctaaacgttcttgtaaacgttccatgctgattagttctttattgagggttgatataaaattaggcgaccacattaagttattaaggctgtcaggaacaatgatttgaacgactgattggattcgctggatcgcatcctgaacgcttaattgcgtgttgagggctttagagatagttgtcatcgctcccggccaaacatctggaaaatgccacttattttggctttgctgcaatcctgtatcatagaagtcacgaattagtttgccccgatcctgctgattgccaccgacacttaagtaaagcattactgtaactcccattttgtttcggcgttgggaaatgccaccgattttttggccgttaacgctgatatcaaaactccccggacagtatgaatgagtgatttcaccagtagcgatttttaggctaggaaaagcagcctgaattaggtcgaccattcgttgatatgcttcatcaatagttaattcatggtcttcgaggtgccatggatagaaaattgacaggtttaaaataccgtcgtcacttacaactgctaatccccctgaattacgcatgaaataatgaaaaccacggtgcgtaagcgaagtaagggcagttgataaatgcggtaatcgttgatcttttaaccctaaaataaccgtatcttctaaggtccaaaaatgaagaagaggatatttgagtttgttagctgaacgtaacaaagcgttggtatagatgaaagacgaaagattatccgctggagttaaaggttgaataaaccgctgaaaacactgattcttaaaattagccatcgtacttcttcttttctatgaaataatatatctatattatacaagaacttacgagaacatggatatttcacggggtatttatccataaatttgcgagaatacccccacttctataagtaggggatgaatcgctctcttaaagcacgttagtgctttttcttttgttctatgatatatttagtatatatctataaaatgtggtgataacaatagaattggatagaaatcagcattcagtatacttacttaattaccatttggtaatggtggttaagtatcgtcgaaaagtaattaacgatgaaatatctgaatatcttaaacatcgttttgtagttgtgggacaagcatacggcattaatttgcaagaatggaattatgatcaggaccacgtacatgttttgtttagagcaacgcctcatacggaaatggctaaatttttaaatgcttacaaatcgtctagctccagaatgatcaaaaaacaatttccagaaattaagcaatatctttggaaatcagccttttggacacaaagctattgcttaattagcactggtggagcgcctttagaagttgtaaaacgatatattgaaagtcaagggagaaaataatggttctaaaagccgttaaaatgcgcatctatccaaattcagcacaacgaaatcagctctggcaaaccttcggttgtgttcgttttgtatggaatcaaatgcttaatatgcaaattgaacggcgcaagaataatccggaagctaaatttgtgaatgcctttgggatgaataatctgttgaaacaacttaaggttgagtatccttggttgaaacaagcagaatcaactgctttgcaaagtgctaatcgcaatttagccgatgcttttcaacgcttttttaaaggtcaaaataagttccctcgatttaaatccagaaaatattctcagagctacaattcaaagtacgttaatggcaatattaaagttttagattgccatcatataaagttaccaaaactcggtatcgtctattttagagctggtcgattgccaatgggtaaaattaagaatgtcactgttcgtctgaacgttgctggtcaatattacattactgttttagtggaaagcgaaaaccaaactcttcctaaaacaagtaaatatattggtggcgatttaggacttaagtcattacttaatctttcagatggatgcaaggaaccgatcaatcattttgaagacaaataccataaaaagttgtatcgttgggagaaattgcgtagtcgtcggttcttaaaggctcagcaggaaatcgcctgggatcatcataataaagtgttagttccacggcaattagatgattttaagaattatcagaaagctcgtattatggtggcgaagtatcgacaaaagattgccaaccaacggttggatcagctacaaaaattcactactaaattggtcaaaaagtacgacatcattgtgttggaaaaacttaatactaagggaatgatgaagaatcaccatttagctagagcaatcgctaacgctagctggtcaaaattagtagatatgttgcaatataagtgtggctggtacggtaaaaagcttattcaggtcaatccgtcatatactagccaaatttgtgctaattgtgggaagaataatcatcggttaggattgaataaatcggaatggttagcggtacgtgagtgggattgtccaaactgtggtaaacatttagatcgtgatattaacgctgcacaagtcatcttgcaaaaaggattagctatccgatagataaagttaggctcgggacgagccttggctaatagtcgtaacctctgcttgaaggttcgttcagaatcggtagggtaagtatgcgatgtttccagaatctcccacttcaagcattaaaccgtaggtttagctaagtgggagtagttcaatggtaaaaagagtataataatgacgatgagcaaagtgaaaggaggagtttattatcaaaagtgtaattcctgttcatgtaaatctctcaacgatcattgatcaaaatggacagcaagaaaaatttacctttactgaagaaggtacttttgttgaaatgaatggtaagtattatttacggtacattgaacaccaagatggtcaagaaacgccggtccaaattaaatttgaagatgagctaatccgcttaagaaggcgtggaaatgtcgaaacaaacctatttttagacccaacacaagaaaccatcatgcggtaccaaacagaatacggcatgattaaaattgacgtgttaacagaaagtttggaaaaagacgttgatgtaaaggctccggctggtcacctttctgttaagtaccaactaaaacaagcgggacaattaataggtagttaccaactagaattgcaatttgctgcttaatattgtatgatgtagtttagactttttgaagggatgtgcaccaatttggatttaaaggtttttgacggtcaggacaaatcagaactttcaatgattgaagtcgcacacgctattttagctcaccatggggaagcaatggcgtttgttgatttaaccaacgaggttcagcaatatctgggtaagagcgatgaggaaattcgtgaacgtcttgcacagttctatactgacttaaatgttgatggcagttttatttcccttggtgacaacacctggggtctgcgtgcttggtacccattcgaatctatcgatgaagccacagttggtgaaaacgaagaagatgaagaggatgatcgtccaaagaagaagcggcgtaaagtcaatgccttcctcgcagacaccgatgacgatgatgatgtaattgactatgacaatgatgatcctgaagatgaggatcttgatactgacgatgacactgattctgaagatgattatgatgacgacactgatgacttcagtgacgacgatgatgatcttgacgacggtattgaaggtcagctatcagaattacatgatgaagaagatgaagacgaggatgacgaatgattttcaactttgtgcttgactattatttattgaccctgtattatttttcttgggcgcctgtaaaaacaggccaataagttcgtagataaataagctccctgtttcagtgttttatttgaaatagggagttttttctattatcacacccgcaaatataaaaaaggagtagacgacaatgacgaaatacatttttgtaaccggtggagttgtatcatcattaggaaagggaatcgttgctgcctctttaggacggttattaaaaaatcggggcctgaagattgcaatccaaaaattcgatccttacatcaatgttgatcccggtacgatgagtccataccaacacggtgaagtttttgtgactgatgacggaacagaaactgatttggaccttggtcactatgaacgttttatcgataatgatcttaataaatattcaaatgttacaacgggtaaaatctactctgaagttcttcgtaaggaacgccgtggggattaccttggtgggacagtacaagttattccacacatcactaatgccattaaggacaagattaagcgtgctggtgaaagtactgatgctgaagttgtaattaccgaaattggtggtacagttggggacattgaatcacaaccattcatggaagctattcgccaaatgaaagaagaagtgggtagtgaaaatgtattgtacatccatactaccttagtaccatatcttcgtgctgctggtgaaatgaagactaagccaactcaacacagtgttcgcgaattacgtggtttaggaatccaacctaacattttagtcgttcggacagagcaaccaattactgatgatatgcggaagaagatcgccttattctgtgatgttgatcctaaagccgttgttgaatcgatggatgttcataccctttatgaaattccgttaaacttacaaaagcaaggaatggatcaattggttgtcgaccactttggtttaaacgtgccagaagctgacatgacagaatggactgaaatggtaaatcatattgaacatgacttaactaagaccgttaagattgcgatggttggtaagtatactgacttacaggatgcttatatttcagttaatgaatcattacgtcatgctggttatcctgtcaatgctaaggtaaagattgaccactttaatgctgaaaacattactccagaaaatgttgaagagacattgaaagactacgatgggattcttgttcctggtggttttggaaatcggggagtagaaggaatgatcactgcaattaagtatgctcgggaaaatgatgttccttatctcggcatttgcttagggatgcaaacagcatgtattgaatttgcacgcgatgtattaggctacactgatgcaaactcaactgaatttgatacaaacactaaacacaatattattgacttgatggcagatcaagcggacattgaaaatatgggaggaacacaacggcttggtgcatatccatgtaagcttaagccaggaacagttgcggcagcggcttatggtaaccaatcaatgatcagtgaacggcaccgtcaccgttatgaattcaacaacgactaccgtcaagaaatggaaaaccatggtttagttatttctggagtaaacccagatcggaatttagttgaagtagttgaaattcctgataaaaaattcttcgtggctgctcaatatcacccagaattcaagtcgcgtcctaatcatccagaaggattatttgctgcatttgtaaaagcagctgctgaggacaaataaaaattaagttgtataatatatttaatacaagagatgggggcaagaatgtcgcttctcttgttttttgtttagtagaattgttaaattttaagttaaatatgctaatttttggcctgaccttatgattttttttaagattgtttataaaaggttgtaattctcttgatatttcattatcattacagttgactgttttgtaactgaaataatcattaacttagcttaaatgaaaaacagactaaaatttttaagtgaggaaacgcagaaatgaagaaaatgatcattcaaggaggaaaccgtctttctggcgaagttacgatcggtggtgccaaaaatagtacagtggcattaattccagctgctattcttgcggatacccctgtagagtttgacacggttccagatatcttggatgttcacaatctgatgattattttggagtcaatgaatgtaaagtccgagtttagtcacggagttttagatattgatccaacacaaatcgtagaagctgaacttccaagcaaggcaattaaaagtcttcgggcttcctattactttatgggtgcattattaggtcgtttccatcgcgcgacattaacatttccgggaggcgataatatcggcccccgcccaattgaccaacacttaaaagcatttaaagcacttggagcaaccgttagcgaagaaaagggtactgttcatttagatgcgccgaatggcttacatgggtctcggatctttttagatatggtatcagttggtgcaacgattaatgctaccttagcagctgttcgcgctgaaggaacaacgattattgaaaatgcagctcgtgagccggaaattattgatttggcaacattcttaaataatatgggcgccaaaattcggggtgctggaaccgatactatccgtatcactggagtaaagacacttcagtcaatgaatactcatacaattattgctgatcgaattgaagcaggaacatacctatccttggcagcagcgcttggtgatggggttatgatccataatgttattcctgaacacttagaatcatttaccagtaaaatgattgaaatgggtgttgaacttcaaatcgatagcgataagatttatgtaccaaaatccagtcatttacatccggttactgttaagacaatgccattccctggttttgctactgatttacaacaaccgcttaccccattgatgtctcttgctgatggtgatagtacgattgttgataccatttatcccaagcgtgtaaagcacatttcccaactacaaaaaatggggatgaagattgaagcacatgatgggatgattatcgttaaacatacagaaaagcttcatggcgcagaagtctctgcaggtgagattcgtgccggagcagctttaaccattgctggattaatggcagatggacagactgtaattaataatgccggaaatattttacggggttacgatcgaattgtatggaagcttaatcgccttcatgccaatgtttctattgaggacgattcttcagtaaaaattggttagaagttgcgtacttctttaaatcgtggtatcctgttagagttgattatctatgtttcaggcaatgattcatggcaaaaggagcgtaataaattatgaaacaaggaattcatccagattatcatccagtagtttttgaagattcatctactggttacaagtttctctctggctcaacagccacttcaagtgaaactgttaagtgggaagacggtaacgaatacccattaattcgggttgaagttacttcagattcacacccattctacactggtaagcaaaagtttactcaagccgacggtgctgtcgacaagttcaacaagaagtacggtctcaagtaatcgaacttcttataattcaaaaaagccgggaaaagcgaaagtttttcccggctttttttgaattaagtctaataaatcattattaacgttattttgcgtctttaagtattgatctttctctgcgtataatattgataattgagaaagtgggggctacctatgcatgaaaaaataattaatcgaataattgctctgcatcgttattcttttgttagaataactcggcagacattaattatgatttttcccattgtttttattggaacgatggcaaagatgattttgaaaactgtttttaaaccagatggatttatttataatattgcttttcttgatgtaataccacagaacgtgttgcggattattcaatttatgttaactagcattagtcaattaaccttagggattctaggaatttatactgtttatatggcagcaaaatttacggcgaaaaggtatcggcgagacggtaaatttgccggaataaccgctattttgacccttttactaatgtcttatcgttatggcaagtcgtccccgcaattttcccttagcttttatcaacggctcctcagtggcaatagtttgttaatcgttttaattcttggttacggaatcggccagctttaccggtggttaaccccgcccaaagatggtgataataccaatgcgttgccgttattacaggaacgatcatttagttcaatgctgccaatgacaattagtcttatttttggagtgacggttgctcttttcttaaattccaacacaatctatcatgcttggtcaacaagttactccacgttagttacgactgcccaagagcatcggcaattatggctgacgttattagctacaatggggctaacaatatttgattggttaggattaggtgttccatacacttcgatggcgttaacctctggagattcatttactgctaacttgaactatgcgctcgctcatggaactccgtggaatgtaccgtatgagtttttaggcagttctctttataattcatttgctaactttgggggcgatggattgatccttgccttgatagttgccattctgttaacttctaatggctcctatatgcattgtgttgcccagtggacggccttaccaacactatttaattttaattatgcggcaatgattggcttaccggttgtatttaatcccttatttctgatcccatttgtcttcttaccgattgtaaacattctccttgccagtttagcgattgcgattaacttaataccttcaacaccttacccggttttgcaggggacaccgggaccccttattagttttttggggacaaatggtaattggggaattttgatttttaccttggtattgcttttaatcgatagcgctgcctatatcccctttgtaaaactggccttagtcgttgaaaatcgcttaatattagcagaacaggacgtgatcagtcatgaaaaaaatgactaaatcaattctccacactcgtttagtattgattggcctaatattgatcttagtcctaatggcaattccagcatattattggatgaaagatacaaataaatatttagctgcccaacataattctagaatgtcgccgataattatggttcctggaagctcagcaacacaaaaccgctttaatccacttattcgtaaacttaacgaggatagccctaaaaaacatagtgtgttgcgcttagaagtaatgaacagcggtaaaattgtttcgcaaggatggataaatcgcggcgataacgagccgattatcgtgattggctttgagaataatcgcgatggctatcaaaatataaagaaacaagcgcaaatggttaataaagcctttgaacgattgacggaagagtataattttaataactttaaggcgtttggccattccaatgggggtctagtatggacttattggttggaacattactactctgaatataaagatgcgattacaattaaaaggctaatgatactgggaacgccatacaactttgcggagtcttctgttagccatccgacgcaaatgttttctgattttgtaaagtatcgaagtcgaattcctaaaaacttattagtttattcggtcgcagggacagaaacttatacatcggatggtctcgtcccagaaggaagcgtcgatgccggtaagtacatttatcaaaaacaagtggcccattatacgagtatgacggtcacgggaaaagatgctcaacactctaacttgccacaaaataaacagattgtacggttaattgaagagtatttgcttgatccaaatgacaacggtaatcctaattcgcaaaataagcagggggctactcaaaattaattaagcaggttatactaagttcataataaaaagtaaggagttcaatatcgtgaaaaaagataaaaagcgatcatttgaatggttatggtggacagcggttgttgtactgttattgatttcagttgtcttaatttttaaccaacagattaagtcttacttagtagggagttataaacctgagattactcggcaaacggttcaaagcaaccaaaagaaaaaagcgacctatgattttcaaagtgtcaaagatcttaacttgcaaacggctgccaaggctcgtgcaaataagcaatcgattaataccattggagcaattacggttccggctattaatatgacgattccaattgctaatgggattgataatacaacccttgcgttagcagcaggaacccttcgtccggacatgaagatgggggaaggtaactatgcgttagctggtcataatatggcccacgggagtaaaatcctattttccccattgtattatcatgctaaggtgggacagatgatttatatcaccaacatggatcgcgtttatgaatataagatttatcaacgtgaattcattgcggcgacccgggttgatgtggtagataatacaccggaaaagattattactttgatcacctgtgatgctaccgggaccaatcggttgatgatccgcggtaaatttgttaagtcagaaccatttacgcaagcaccacaaaatgtgcaaaagaattttagcgagaaatatacaacaggtcgttaaacaacctaagattagttcaggaagcgagacagaagtcacttgtgacttcgtttttcgacgcgaagcaagcctctgggagccctcgcaagcaacaataggcctccaatgttcggtttttaagccggacgttggaggccattgttgtactgcgtatttgctttttatgaaagtaacttaacttatatcaaagtccttttttgcttgcaaatttttagcaatatttgtaatccattccaaattaagaaaaacacaatgacgataaaaatagccaaattaaaataaattttaagtaaacagatgagcgaacggacaggaatgccaccgtttgctcatttttttgctgtaaataaatttcttgactcttttttaggaaccacctaagaaggagatacattgaatttaaggagatgcagtaatggaaaaacgcgaacaaatgaatgttttatggtttgatgaattgcatcgctcggacgttaatctcgttggtgggaagtcctcttcattaggggaaatgacttctgcaatgaaaattccagttccatatggatttgcgacgacaactcacgcttatcgtcaatttatggcggaaacgggattaaacgaccaaattaataaattattagccgaaattaatgactatgaaaatgctgacgaacttcatcgggtttgctcacatattcggcagatgattgtcgaagcaccgatgccaagtgagatcgctatgacaatcaaaaaagcttatgcagccttatcagaaaaaatgggtgaaactgaaccatttgtagcaattaggtcaagtgctaccgctgaagatttaccgaatgcttcttttgcggggcagcaagaatcgtatttgaacgtgcgtggagctgaaatggtattagcaaaggttcaagaatgttatgcttccttgtttaccgatcgggcaacctattaccggcataagcaacattttcctcatgaaaaagtggctttatctgcggccgttcagatgatggttttctcaaaagcttctggggttatgttttcagttaacgtggcgaacggaaatgatgcccaaattgttattgatacgatttggggattaggtgaatacattgttttaggaaaagtaacaccggatcattttgtgattaataaaaataaccttcaagtagtagaacgttcggtagttccgaaagcaattgaattgtgtcaaacccctggtggcggagtacatgaagaaccggtgccagcagaccgggcaatccggccagcgctaactgaaaaccaaattcatgaattagcaggatacgcaaaggaaattgaaaagcactatggttgttacatggacatggaatttgcgctagacgcccgcacagatcggttatggctagtacaagctcgtccagaaacggtttggtcgaataaaaataataagcaagcaacaaaggagtccactgtctcaatgaataaaactaaaaaaatcttggtcaaaggattaccagcaagtccaggcgtttccactggaaaggtacatgtaattgcggatcctaaagatattgatgaatttgaagaaggagaaatattagtaacgttgatgacttcgcctgattgggtaccggcaatgaaaaaagcagcagcaatcatcactgataatagtggaatgacctgccatgccgcaattgtttctcgtgaaatgcagattccgtgtatcgttggaaccaagagctgtgggcaggcagttactgaaatgctacaagatggtgaacaagtgaccattgatgctaaaaatggagtcgtttatcaaggtgatctcgcagaacaatttaatggcgaaaaagagacaacggaatgtcaccatgcagaatattacccgccgactgcaaccagggtcatgatgaatttaggcgatccagaactagcagaaaaatatgcagaactccctgttgatggcattggcttaatgcgagaagaatttctttggacgacttatattcatgaccatcccctctacttaattgaaactggtcatcccgaaaaagttgttgatatgttagcagatgggattgctaaagtggctcgggcgattgctccacggccgatggttttacgtttttctgattttaagtcgggagaataccgtaatttaacgggcggcgataaatatgagccccatgaacctgccgacttattgggatggcgcggcgcttctcggtactatgatcccaaatatatcgaagcttttaagctagaacttgcggcggtaaaaaaggtgcgtcgagaattccagttaaagaacctcaatgtaatgattccgtttgtccgcaccgttgccgaagctgataaagttacaaaattaatggcagctgccgggttacatcgtggtccagattttaaggtatacatgatggccgagatcccaagtaatatcatcttggcagatcagtttaataaatatgttgatggttattcgattgggtccaatgatttagcaatgcttattttaggttgtgatcggaataatgatacagtggcccacctctttgatgaacgtgatcttgcggtgaaacgtgcgattagccaccttattaaggctgctcaccaagataacaagacggtttcaatatgtgggcaagcaccatctgaatatcctgaattagcatctttcttaattcagcaagggattgattatatttcagttaatccagatatggttaaagaaaccaaacagaacgtggcaaggattgaacagcgcataatcctggataacgcgacgggtaagggacgacaagctgtggaaaattatgcatggtagaaaggattgaataaaatgcaaatttttgttgatattaatgcttctgaaaacggtaatggttcacaagagtttccgtttaagtacatccaacaagcggcagatatcgctcaaccgggggattatgttcaagtaatgccgggggaatatcatgaggaagtccatccacaatattccggcactagtgataagccgattatttatgtatctgctaagcaaaatcgggcaatcattacgggcgctgaccgtgttactggctggcaacatgttgctggtccggtatggcaattaaaactccctaatgccgaatttggtaactataatccatacaacgttttagttgatcaaacctttaatcatgccggtgaaatcttcctaaataataaagcaatgtatgaagttgatcagttagcaaaagttgaaacaccaagtgaaaacaaattttcccaagaccggaaatttacctgctatacctggtataccgaacagttgccagcagaagattcaaccgtaatctatgcaaactttcaagcgcaaaatcctaatgatgaatatgttgaactgactttccgtgagacgtgtttctatccagaaaaagcaggactcaatcaccttattctatcgggctttacaatgacgaaggctgcttgtcgatgggcatcttcgcaatataataaggggattattggtactaatcgtggtcagggatggaagattgccaagtgtgatatttctcacgctaagtgttctgggatctcccttggtcgaaatattgttccaaccattgacgatgataaggtttatccacaccggattaagaacaatacgattcatgattgcgggcagactggaattatcggtgttgaaggcaacccatcgccgattattgaacacaatagtatttacaacattaacgtccgccaaaaccttgtcagtgatgatgtcagtgcgatcaacctttcgccagcgattggggctaagattttacgcaactgcattcatgattgcacgcgcggaatttggcttggtggcaaggttgaagatacccaaatttcacggaatgtgttctacaacaattcactgccagattcatttgaagtcacaaacgaaaatcgggaggacttagtagcggcccttggtgaagatattgaaattaaggattcgatgggtgtgaccttgattgataacaatttcctattatcggattatgcgcttaagctcgaatctaagggcgtccttctcgttcataacctaattaatggcagtgtggaatggttaagcaatacgaatgttgctgaaaatgatccttactaccaccgcctttatcaacaaaatgcgccagaaagtgctccttacgattcttcttgtttctataacaatgtctttatccggaagaacctccggagtgaaatggcaaaattaattgcatttgcccacaaacaggcaagtgaacaaccaatcgataatcatattagcgatgataatgctgcttatgttggcctagccagtggacaacgaagctatattccagctaataaagcaggaaatatctttatgaatgatgagcaagaagacgttaaggtcgccatcgattcaagtgaagatggggtatttcttaatagtaatatttgcgactacttgaatgaagatactagtcgggtgatcgcggttggtgttactcccgagactgcccgtgattttgatacagatttcttagggaaacatcgtgaaggaattagtgtaaccgctggaccttttgatacgaaagaagaatatagtcaacgcttatttagactactgttttaaggaggtaaaggaatgcgcaaaccgtttattattgcgaactggaaaatgaataaaaatgttcatgaatccgttgcgtttgttaaagcaattaaagaaaaactcccggcaaataaagaaattgggatcgcggcacaagcagtctcgctctataacatgaaaaaagtggcgggatcttccaacttacaaattattgctcaaaatgcatctgctgagttagagggaccgtatactggagaaattagcatgcgaagtttagcagatgcgggcgtaacatacgtgatgctagggcatttagagcgccggcgcctttttaacgagaataatgaatcaattaatcaaaaagttttagcagccctcaatgctggtattattccaatcatttgtacggatgaagagatggtccaaacagaagttaacggacaaattcattatgtatttcgccaactaaaaagcgtccttaaaggggtaccagctaataaactatcacagattgttatttcgtatgaaccaagttgggccgttgggagcacgcatcaagcaaatccagacattgcggaagagggatgtcaggcaattcgtcaaagtctagttgaaatgtatggtaatgagattggcgagcaagtccgaatactctatggtggcagtgttaatcccgagaatattggtcaaattatgagtaaaccaaatgttgatggggcgctaatcggtcgcgcaagtctcgagattgaaagcttcttacaaatgattaattatatcgaattagcgagcaagcagaagttacaggtaatttaggaggaagaatgatggcttactttgataacggaaacaaactttttgatgatgcacggaagaatcaatacgcaattggggcatataatattaataatcttgaatggacccgggcaattttgcgggcggcagcggagactaatactccagtgctgatccaagtttcaatgggagctgccaaatatatgggtggttataaatttgtcaaagatatggttgaagaccagatggatgcaatggaaattaaagttccagttatcctgaatcttgatcatggtgactatgatgcagcgattgaatgcattaacttagggtattcgtcagtcatgtttgatggccataagttgccgattgaagaaaattacgccaaaaccaaagagattgtccaattagcgcattcacgcggcattgcggttgaagccgaaatcggtaaagtgggagaaaatcaggataccagcagtggagaacttgctgatgttgaagatgcaatggcgtttgcagcaatgggggttgaccgtcttgcttgtgggattggtaacattcacggcatttaccctgctaactggccagggttagactttgaccgccttcaagaaattgcgaatgcgattgatattccgctagtgcttcacggtggttcaggaattcctagagaacaggttcaaaaagcaatttcaatggggattgcaaaggtgaatatcaatactgaattccagttagcgttccaagatgcaacccggaagtatattgaaaatgaattagacctcaataaagaacaaaaaggatatgatccgcggaaattattacttcccggaacagatgcaataactgctaaaatgaaagatatgattgaatggttaggcacgccagcagtcgcctaattataatggaggttatcgaatggcaatcacagtttactttgtccggcacggtgagacctacttcaaccggtttgctcgcctgcaaggatggtcagataccccgcttacagaaaaaggagagatggatgctaaaaagatcggccaagttttagcggacttaaggatcgattaccttttctccagtgatttaaaacgagcagttgatactgcacggcttttaattgcggatcacctaactgcgacggtgaaggaaccaatccaaaaaaagttcttccgcgaggtattttatgggtcttttgaaggtcatagtaatgaagaaggcgctatctgggcaagctatcttgaaggcaagcgatttaggcgtatcggtgaattagttgatgagtttggcgttgaaaaagcgcatgacttactgaaagccgccgatccggctcaccttgcagaagatagtaatgaattaaatgcccgtgtagagcaggcaattgcctttttgcaaagcttaccggatgagagtaatgtggttgtagtagcccatggatcgattatccaatatattgcggggatgtatgggaaacctggatacaagtatgaaaacttacataacggcgcgctgatgaaggttcagctaacagctagagacgttgaaattactggatacaatcaatttaaactataaaaagaggcaaggaattattttccaaacctcttttgttgttaggacaattctttagtaattttatccagccataatggcaatgtctcgtttaggctattgtaagtatcttcaaagcggtgagtataccaaggatcaggaatttcttgatcttctttgccaggaattacttcatatgctaagtggactttatcacgatcttgcgctggtgcaatgcgttgtaagttgtacttgttcatattatccatgcagatgatgtaatcagcccactcgaagtcttgtcgtgtaattggacgtgagattaagccatccgttgataacccgtgtgcgtgcattgtctttgcggcacctgggtggggaccatttccttcttcttcgttacttgttccagcagaatcaacattgattttgccatttaatcctgcgtcatcaaccatttgcttgaacattgcctcggccattggtgaccgacaaatgtttcctaagcagacaaataaaacgttcatgtaatcacctcgtttatacttctatcataccgaaaaagataatattttgctaaaatattcgggaatcctaacactatccttaagtttttggtaaaattaagaacaaatatttttagaggaggaacaaaaatgacccttattattgtaattgttgtcattgtcttgttgattgctatttatgcaggactttacaacagtttgattcaattgcggacacacgcacaagaatcctggagtcaaattgatgttcaattacaacgacgtaacgacttgatccctaacttaatttcaacagttaagggctatagcaagtatgaagcgggaaccttggaaaaggtgacaaagctgcggacggaattaaatagtattccagacagcgatcatgctaaaaaaatggaagtttccaatgaattaacgggaactttacggacattgtttgccgtcgctgaaaattatccagacttaaaagcaagtgctgaataccaaaaattaatggaagaattaaccaatactgaaaacaagattgcctactcacggcagctttacaacagtactgtggcggctttagatgctaagattcaatctttcccaagcaatattgtggctaaaattcatcacttccaacaaatggattacttacaagtgccagaagaagtcaaggctgtgccaaaagtttcatttgatgatttaggtgattaagcatgttatatcagcaaattgcccgtaataaacgaaaaacaattttggtgatgtttgggttctttgtattgcttgctttaattggggccgcgattggctatttatttgcgcggacagcgattggcggcatgatcattgcggcgattattgcggtgatctatatgtccgtgatcattggtcaatcgactgatgtagtgatgcggatgaataacgcgacggaggtacgatcagcgagtgatgcgccagaactttggcatattgttgaagatatggctttagttgcacgggtaccaatgccgaaagtctatatcatccatgacccaagtcccaatgcttttgcgactggtaatgatcctgagcatgctgctgtggccgctactactggtttgatggaaaaaatgaatcgtgaggaactagaaggggtaatggcccatgaaatgactcacgttcgtaactatgacatccgtctgcaaacaattgcgttagccttagcatccgcaatcgcaatgcttgttaattttgctggaaatttctggtggattggtggtcggagcagtagtgatgaccgggataatccatcaagtattttcgccatccttggttcgattcttttgattatcttagcgccattggcagcaaccattgcgcagatggctctttcacgtaatcgggaatacttagccgatgcaggtgctgtggaattaacccgtaatccgcaagggatgattagtgcattggaaaagctaaaaactgctgttccaatgaaacatgtggacccaagcagttcggcattatatattagcgatccagaaaagaacgctaagcaccatcctttttcaaatctatttgacactcacccccgctagataagcgaattgaacggttgcgtcaaatgtaataagtttatagcaaagactgagaaaaaacttttgctttttctcagtctttgctatttttactcacgacttattgtttttaatcgccttatactagtgagggtgatataattaaaaagctagaccaaagtatcaaaagaagaggtatctttttcatgaaaatgaaattagcggaaattgccaaggcgatcaacgcacaaaatgacattgaacaatggaaagacgtagaagtgactagtgtgtcatttgacagtcgacacttagatcaagggagcttatttgttccattgcaaggtgcccaagacggccaccaatacgtaccgagtgcttttaccaatggtgcagtagctagtttatgggctagtgaccatgagataacggatcagacgcacccgctattagtcgttagtgatccactagcggcccttcaacaactagggaagtactacttgcataagatcaatccgattgttgttgcagttacaggcagtaatgggaagacgacgactaaagatatgattgcgtcaatcttaagtacgcagtttaatgtcgcgaagacatatgctaattttaataatgagattggggttccagtaacgcttcttaacatggagtctaataccgaagcagtggtagttgagatgggcatggaccgttttggtcagcttgacttcttaagtaagcttgtaaatcctgacattgccgttattacaatgattggggaagcacatatcgaattcttcgggactcgtgataagattgctgatgcaaagatggaaattacccatggcctaaaggaagatggaacactagtatttaatggggatgaaccattattagaggaacgggtaaaagatcttgcccaacgacagatgcgctttggtcggcaactaagcaataatttgtatgcaacaagtgtccacgatgaaccacggcagttatcatttaccgtcaacgaatggccagatgaagaattcactatcccaatggttggtgaatacaatattaataatgcgttagcggctatggaagtgggtaagattctgcatattactcccgcccacatgaagcaagcgttggcaaacgttgaattaacggaaaatcgtgctgaatgggttaaaggaaagaatggtgaacagatcttaagtgatgtttacaattcaaacccgaccgctgccaaggaagtccttaagacgattgcagaaacaccagtagctggtcgccggatcgccgtattaggggacatgctggaattaggggatgctgcggcaaagttgcatgctagcttagcagaagagattgaccaccaaaagattgctagtgtttaccttgtaggcgaacaaatgaaaaatcttaaagacaagttgatccaagaaggatacccagctgaagatatctatcattatgctgctagtgaccttcaacaattaattgccgatcttacgactactttgacaggtgatgatattgtcctattgaaggcaagccatggcattcacctagaagaagtcttgacggcattaaaagcagaatagttaatatatttgccagtcgattactgatgcttatatcataaatcgactggtcatttttaggaggaaaatttttgaagtttagtgaattaggcttatccgatagcctattaaaagcaatcaaacggagcggatacgaagaagcaacaccaatccaagaacaaacgattccaatggttcttgaaggtaaggatgttattgggcaagcacaaacagggactggtaagacggctgcttttggattgccaattattgaaaacgttgatactgaaaatctcaatattcaagcaattatcatttcaccaacacgtgaattagcaatccagactcaagaagaactttatcgtcttggtaaagataaacatgttcgcgtgcaagtagtatatggtggggcagatattcggcgccaaattaagagcttgaaacaacacccacaaattctcgtggggacccctggacggttacgtgaccatattaaccgtcatacagttaaacttgaccacattaagacccttgtcctcgatgaagcagatgaaatgctaaacatgggattcttagaggatattgaatcaatcatcaaggaaacaccagatgatcggcaaacattgctcttctcagcaaccatgccaccagaaatcaagcggattggagttcaatttatgtctgatccggaaactgtgcggatcaaggccaaagaattgactactgacttagttgatcagtactatattcgcgcgcgtgactatgaaaagtttgacatcatgacccgtttaattgacgttcaagatcctgacttaacaattgtctttggtcggacaaagcggcgggtagatgaattgtcgaagggcttgattgcgcgtggctacaatgcagctggtattcatggtgaccttactcaagataagcgttctaagatcatgtggaagtttaagaacaatgaacttgatatcttagttgcaacagatgtggctgctcggggcttagacatttccggggttacgcatgtttataattatgatattccatctgacccagacagctatgttcaccggattggccgaacaggacgggccggacatcacggggtatccttaacctttgttaccccaaatgagatggattaccttcatgagattgaaaaattaacccgggtacggatgctgccacttaagccaccaacagctgaagaagcatttaagggtcaagttgcctcagcctttaatgatatcgatgaattaatcgcgcaggattcaactgatcgttatgaagaagccgctgaaaagctactagaaactcataatgcaactgatctggtagcagcattgttaaataacatgacgaaggaagcggccagtgaagttccagttaagattactcctgaacgtcctctcccacggcgtaacaagcggaataaccgtaatggcaaccgaaataattcgcatggtggcaaccactaccggcgtaagaatttccgccgtcaccaacatggtggtggtcaccgaaatgataaccatggaaagagccattccagtcgccatgcatttaatatccgtcatcgaaaagaagattaattagctaagaagtctttggttgagatttgaccaaggactttttttaatttggcagattgcaagaaataatttgaacaaagttagtgacgcagattacgcaaaaagatctcaatcggttgacctttggggataaagcgtcgtagtactcggttgcgattctcattactgccccgttcatgtggagaataagcatgcgcaaagtagaggggaatcctggcctgctcttcaattagcttgtagttagcgaattctttcccatggtcaacagtaagggtcttgagattatcttctaactggttagctaattctaaaatggccttggtcattgaggtactatctcgtccctgaagccgtttaacgatgataagacgactcttacgctcgacaaacgtagctattgcttgacctttacgctttccagataaaactgtatccgcttcaaagcgacctgaggtatgacggtcaataacttcagcaggacgatcttcaatggaacgtccatggctaaaagtcccacggggttctttggctcgtcggcggcgaattccatggtcaggtaaatcagccacgtcaatatccaatactccttgatcaatccagttgtagatggtcttgtaggcgattctaactacatgagccacttgttcaatcgaccatttttggatcttaatcttttcttcaattaatcgcttgaggttagtcgttaagatggttttacgcccacgatgactaagtttagcttcatgatcagcttgagctttaactgcgtgatattcaccagtcaaacgatgaacctcattaaagatcgtggttttaccgaagccaaggtaatcagcgatgtatttaagggagcggttttcataacgaagagtttcgatgacaacacggtcttcaaatgataaaatagtggtgcccataaaggtccttctttctaatggaatgttgtggtaacaccattaaagacctttatgggtttttatgtccactaatatgttcaacttaaattttgcaatctaccataaattaaatatgggtttgtgacttaagttaagttacttccataaaagacaaatggcgcagtacaacaatggcctccaacgcccggtaaaaccgaacgttggaggcctactgttgcttgcgggggctcgaaaacgaagtcacgagtgacttctgtctcgctcccatttcgttatcttttttataaaaatatttattctaattatttgatttatttataatatatttgttgcgactattacgatgattagtatctgagaagatgagctcatgtagatattaggctattatttcatcatgcaaattaagtgtaaaggggggctaatttttcttgtttggtacttgaggagctgcagagttatttatgccttgtgtgagagaggttttgacgatgcaaaaattagagcaattgattgataaaaactttgctgaaacagctcatggtaaggttgcaaactatattccgatattaggaattgttgatccgcaacaactgggcattgccatttatgacgttgacgaggacgaaattgggaccgctggaatggcaggaacgagatttgcgatcgagagtattgcgaaggtcataactttaatattaacgatcaagagattaggacataagcgcgtcttagcagaactagaaaatggttcggcagattatagcctaagttcggtactattggatgacgagttaaccgagcaggtccatcggataaattaccttaataattcctccgccttgttaacgacagccttaattgaccagttgatggggcagaatagttttaatgcccttctcgggttctgccgtgagatctgcaatgacccatgcattagcttgaatgagcgtttatttcggtcagtaattatgaatgataaagatattcatgcactggcttactatatgaaagataaggatattttagagactgttgatcaaacattgataacttattttatgcaaagctcaatgatggtgacatcacagagtcttgctaacttaggagcagtcttggcaaatgatggaattaaaccttgggataatgagcgtcttattagccatgaagataacgagttggtaaagaaattgctaacaacagttagctcgtttgaagaatcaaaagaatacacaattaaaattgaactccctattaaaagtggtactggcggcggcttattggcttgtgccccgcaaaaatgtggtattggtatttttttagtccagctcttgatcaacatggcaatagtttggcaggaatgagtttattacaagatgttgttgagcaattagtagtttaataaaagcgaggcccgaagaaaattcttcaagtctcgctttttgttaatgtaatttttcttggaatttctgtaaattaccaggagttggggttaagttagtccattctggtgaaaggaacttactattgatttggtaatgtggttgcggttgcttattagaaataaaactattagtagctttatcaacttttacccaaccagcccaaccgatatggatagtgtcttccataaatccaggcttatcaccatcatgagaaagatcaaaaatatgattgaacccttgttggcgaagctggaatttaatttttttaacagattggtaatacatattcatgtccatccccgtgtacttttcccactttgaattaaccggtgggatgataaagaggacatttgaattggtattcttaaactgattcaaaactacttccaaatcgccatattctggtgacttagtataattgaaatttcgttgtgatccctttgttttcgctaagtttttctttacacgctgggtatagaagctgtttttgataccgaaacggttgttatcagtatcacgtgcggcttcattcattgcatcatcataaagttcattataattgtaatgctgaggaagcttcttaacatttgggaggatatgcttgccatagttattatttaattgaaaacctgagaagatggcatcttcatgaacaagcatgttaagtcggaagcggataactcccatgtcgaaactgctcagggattttccttcagcgatttttttagcatacgaagaaacagtcccatctttgccaagcattgcaattaatcgcgttgcaatgtaacgatcatatggtgatttaggattagcgtgttgaagccagttaaggttagcgagttcaccattatagtacttgaaagctggtggttgaacaccctgcttggtaaaccattgtggtgaaatgatatagactgccttattatttctcatctgcgtttccattgaattaatgttaaagaattgcggaagagattgggtaccccgtgaaccaaagaggaaaggagtatagttatgataacgagcagccattacagaaggatggaagcgatccattcgccgtaattcactagaaccaaagaatggaacatagtgagtgtgcttatcactgagcgcttgttgcttaattgattggttcttaaaaacaacggggcttagtgatactgcagctttatgttcaatcgccgctgagtgctttttactaatcggcagtgaaaacaaaagaactactaatagacaagcgacaatcagcgggccaaagattgaccacagctttttgccattatgcattttggagctcctttacccgttcttcaatcttttcaatagtgtcccattggctacggtcaaattctgaaactggtacttgaacgccaaaagcatcttgtaaaccgagaagaagactaacagttgccattgagtctaaaagaccactttcaaaaaggttttgacttgcatcactaaagtctgcagtatcccgaccagttgcatcagctaaaatattaataatttgttcttgcataattaaaatcctcctaaaattatttgaatagataagtatctaagaacccactgaagatcaagaaagtaaacattacaaagttaaatgtgacaaaaatagcaactccagtagtgaacttattatgtggtagctgttttaagtttttgcgcttgaaacgcagccaccagtcattaactactaggcctagaccttggagaaaaccatagagaatatagtaccaggtaattccatgccaaaagcccattagtaacatattaagcatatatgcggttgatgacaaggcatttcgattcttaaaccatcgttttttggtagcaagaaagacgaaccgcataaaaatataatcacggaaccagaaagaaaggctaatgtgccaacgattccagaactctttaaggtttttcgatttgaaaggctgcttaaagttcatcggggtacgcacacccataaagtaactaatagcaactgcaaataatgaataaccggcaaagtcaaagaataagtaaagtccgtaagtgtacatgacaccgactaagttccaagaagggaatgatggatcagccaaggccgctttttcaaagaaggggtaaaaacgctgaccaaagaaataaccgatgacaaacttgtacaagaacccaaggaataagtagaaaattcccgtattaacaagattcaaatattcctcgcgggtcggaacctttttataatctttttcaaaacgtcggtaacgatcaattggtccagaagtaatggttggcatgaacagaatgaaacgaatgaacttccatggggaaatctctttgatcattccatcacgcgtttcaattactgttccgactgcccggaaagttaaataactaattcctaagaaaccaaggagggagttatgaccaaccattgccggtgagagcttaacaattacaatcggcaaaattgataaggcggcagtgaagtaaaaaacaccactcgaattattattttgccggtagcgatgataagccatcacaataattgtctggtaaataacataagtaattaatgaaattccttgttgccagcttgaaccatcgaacattaagaagataaaaatgaaactaattaatgcttcataccagttaaacctcttcccaaagtaaaggccgattcccaacggcaaaatagcaagaagtaagtagaagaagtataccggggttccataagcactgaaattaggaaggtttgaaatccaatcaatcattacttgttagcctcagcaatcatttgtttaactgcaatcttgccatttgcagacattgggaatgattcacggtaaacgaattgggtaggcatcatgtatggcatgattaagccgtccaagctttcacgaatttgttttgttaatccagccgtatcttcagtagattcgtttggaataacataagcgatcaggtgcgtaactttgccgtctttattatattttggaaccgcaactgcttgtttgattagaggactcttttcaagactggcacgaacttcatcaagttcaatccggtaaccatgtaatttaatttggaaatccatgcggcctttgtgatgaagtaagccatcgctgtcaagggtacccgcatccccagttcggtaagcaggcacaccatcaatcttaaagaatgacttggctgttttttctggattattcatatagccacgtgccacactattaccactgattacaatctcaccttgttcaccgggagtagtgatttcttgatcgccattccaaatggataatttaactccaggctttgcatagccaactggtaagcggtcattattttcaatgatttcaggagtaatctcgattcctgatacggcaaccgttgtttcagtcggaccataagtgttgaagattttagcatctgggaatcgttggtgtaatcctttggcagtctttactgttaattcttcgccacagaagagaaaggtctttaagcttggcattttttgttggttaaatgctgggctaagcattaacatatcagcaaacgatggtgtccctacaaatacctcaagatcaaggtttggtagagcagtgaacatctgaccaaaattttcaacaacttcgtgaggaagcgccttgattgtcccaccattaagtagtgctggtaaccagtacatgtttgaaagatcaaatgaatatggtggctgccctaagaaattagcatgttctttgattttaaattcatcacttagcatccagtcaacaaaggtcataaagttatcatgactaacttcaaccccttttggtgaaccggtagttccagacgtaaagaggacataagctagttcgtcaccattaatcattgctgaagtatcaaaagtttgcggtgttgccaaaattttttcaagctgttgatgatcgacaatcggggcatcaaactggagatcattgcttggaaaatcattaacagcaataatcatcgccggtttagcagtatccagaattgattgcatccgtggaattgctgaatcgttggacactggaatataagtatgtccagcttttagagccgctaaaaagctaataatcatttcaacttgatgatcaccatatacgagaatcggactacgatcaggcaaagattgagtactaagccatgccgctaaagtatcaactgctgagcttaagtccgcataagtggtcgttttgcccatttcatcatatgcgatccgcgttgagttgtccttggcaatttgctcaaagacggtaataatattcttactcatatattatctatttcctccgcattagaattcgttgtagataaatggctcttggcctgctccataataaccataaaggtagattaataaaagaagcactacaaagtaaaataatgtttttaagatgaattgtaatgcaggatggcgttgaataatctgagccatagttctccttctctcatctttataaatttgtaattgacattcatatcaagaataccattaattatgtatctcggctaatagggtgagttactttcaccttactgtaaagtctttaagaaaaaattaatgaaatgttcagaaataagaatgcttattgccttaaaattataactttttctgagctaattgtaactagaaaaatataaactttatttataattttatatgacatgacaatgatggactaatgtaacaataattgcaagaagtgcttattttcgataagattaagcggtagataatagtgataattaaggagacgaacgctcgatgattaaggggattggaatcgatataaccgagattgaacgagttaagaaagctgcgacagcgcattctcaattcatccagcatgtattgacaccgactgaactagaacaatatagtcaatttagcggtcaacgatcagtagaatatcttgctggtcggtggtcactaaaagaatcttttgctaaagcatatggaacgggaattggtgctaaactaggctttcatgatattgaaatcattgataaccaatatggtgcgccaattgtgattaaatcgccgtataatggtaatgctcatgcttcagtgagtcatactgccgcgttagtaatgacagaagtaattttagaaagtgagaataaataaatggttaatggtcgtttgcgagatacatcattaatagtggacttagatgcattacgtcataatattcaagaacagaaaaaagttttgcccaaaaatagtagaatccttgctgttgtaaaagcaaatgcttatggcaatggattgattccagttgcccaaacagcaatgaccagtggtgcaagtggtttatgcgtagcaattttagacgaagcattggaattgcgggataacggtattgaagccatgacacttgtccttggaattacgccagttgaagatgcgttgattgctgctcaagccggagtttctttaacagtcggctccttagattggcttgaacaatatcatcaactagcacaagttgccaagcctaagaaaccattaaaagttcatctgggaattgattcaggaatgggccggattggttttacagaggtcgctacatttaagcaagctgttaagttgcttgatagtcctgaatttgaatttgaagggatgttcacgcattttgcaactgctgatagtcctgatgaaaattactttaatcaacaggttcaacggtggcatcaatttgttgccagtcttgacgaactgccaccatatgttcatatggcaaattcagcgactggtttatggcatcgggaaaaaatcacggctaatacagttagaatggggatttcaatgtacggacaaaacccatctggacgtgacttgaaattaacgcttgatttacagcccgttagttcattagtttcatcaatttcttttgttaagcagttaaaggcaggaagatctgtcagctatggtgctacttatacagcggagcaagatgaatggctagccactttgccgattggttatgctgacggttatccccggtgtatgactggttataaggtattagttgacggtcaattttgtgatattgccggacgagtatgtatggatcaaatgatgattcggcttcctaagtattacccagtcggcactccagtagtattgatgggcaaatccggtgaccaagaaattacagcaactgatttagctgagcaggccggaactattaactatgaaatcctaactaatattagtaatcgggttcatcgcatttatcaccaaagtaaataattaagggaagcgaaggtaatgacaaaacgaaaagtaaaacggggtgacatctattacgctgacttatccccggtaattggatcggaacaggggggcgttcgtccagtcctgatccttcaaaatgacgtgggaaatcattatagtccaacagtgatcattgctgcgattactgcccaaatgcaaaaaaagaagatgcctactcatgtccaactaaaaggtaagtcgttaccgttaactcatgattcggtcattttattggagcaattacgaacgattgataaacaacgattaaaagaccgaattgctcatttgtcgccagagacaatggcaaaagtggataaagcattaacgattagtgtgggattaagtgctgcctatgatgaaaataaatgagtttgacaatttgcgtcagaactcgtatactcactattgaattaatcacggttcttttaatgtagcccagagagactacaaaagacaaaataatataagcatagtgggcacaaaactatgcttcctcttttgtaaagctctaggaccattaaagggactagagctttttaggtctaaggaggatatcttgtgaaagagcaaaaggggacaacaatttttagtattccaatgaagaacagaaagactaatacttgggatatgtttgccacgtgggtcggtgcaaatgccaataatggaacctggtttgttggcggagtgctcgccgcttgtggattttcggttgccatgaaggtcttagtattgtcatctgccttatcatatgtatttttaagtttggtaggttacattggttataagactggggtatcgacgatgactttaagtcgtgcctcctttggtgaacggggcagttatctcccatcattagttaatattactcaatttattggttggacagcagttaatacttttattgcggcccagtcggtaagcattcttttccatgacttattaggatggcctgtgtggggacaacatggcggctatttagggctagtagtcgggattattatcatgagcattctccatattattagtgtttctagcggatcacgttcagtccaaatgattgagcggttagggataatccttgttcttgtattcgtcatttgggagtcagtagctgtttttcgaaccgtttccttcagtcaaattgtaaattggcatgttcctgcgcaatcaaaaatggcagtcggtgcggcggtcgattatgtagcagcttttaatttagcctgggtaactgccggtgctgatttcacccgctttactgctaaagaaaagaatgcgactttgacgccgttccttggtgctttactaggggttgtatggtttgctttcatcggtctgatttcaacaattagtattgcaatttcaagtggggtatataacgcaaataactctgatccctcaacgattgctagtaagttaggactgggggtagttgcccttcttgttattattttgacctcaatgacggcaaatgctgttaatttattagcggccggatcagctctttcaaatatctttacaaagctcaaattaaagtattcattatggatcgtcgtattgcttgcgacagttgtgacctttattccgatgtttgtcggtagtttcttgagtgcttttgaatcattccttgactatgtggggatggtgttaggacctacgatcgccattatttgtactgatttttatttccgtgctcaccggcaatatgatgttgatgaattaggtaaaattggtggaaaatattggtatcgtggaggcgtcaactgggtagcgattattgtttttgctatcggggttgccttcttcttaggtgttcatcagttaccaatcttcgtaaatacgattggggccacatttattgatatgtgtttgagtggtatcctatattatggaattatgttgctggttgaccgaaaggaagatgaattatgctattaaaaaatgtacatgttgataatcatgaagaagtagtcgatgttcgaattctcaatggaaaatttagtgagattaaggctaacttaacgccccatgacggtgaagaagttattgacggtaaagaaaatttacttttgccaccatttgttgattctcatgttcacttagatgctacgcttactgctggtcagccagaatggaatgaaaccgggactttatttgatggtatccggatttggagtgaacggaaacaagatttaacgaaggaagatgttaaatcgcgcgcgaaaaagacattactgaatatggttggtcatggaattcaacacgtacggagccatgttgatgtaactgatcctcatttaattgccgcccgtgctcttcttgaattgcgtgaagaattaaaagaccagatcgacttgcagttggttgcttttccgcaagaaggtattcttagctatcctcatggacgtgaattaatggagcaggcggttaaagaaggattagatgtcgttggtggtattccccattttgaatttacaactgaatatggttggcaatccgtccatttcttaatggccctcgcagataagtacgatcgtttagttgacgttcactgtgatgaaatcgatgacccagcttcgcgtaaccttgaagttttagcgaccgaagcctatgaacgagggatgaaagaccgggtcactgctagtcatacgacagcgatgggctcatataatgatgcttatacttataagttattccgactattaaagatgagtgatattaactttgtatctaatccattagttaatgttcaccttggcggccgtttcgatacttatccaaagcgtcgtggcgttacccggattaaggaattaacagcagcggggattaatgtttcctttggtgaggatgatatccaagacccgtggaatcctctcggcgatggtaacatgttagatgcagttacgatgggtgtttatattgctcacttgatggggtatcaccaactgcaagatgcctttaattatgtaacttataacggtgctaagacattgcatattagtgataattatggaattgaagtaggaaaaccggcaaactgtatcttattgaatgctcacgacttttataatgcccttaataagcatgttgaagttctttataatattcgtcatgggaaagtccttgctgagacgaaaccagctgaaaccaaagttaatataaaataaaattaaagaaatctcataatagttattgacaagttagggaatggccggtatattatatccagcaattaaatttagattagaaaagcgttgaaggaaataatgatttgaaattggtaacagagaattagcgggtggtgtgagctgatcgagatttctaattgttaatcgttcctgagttaccggctgaaaccaagtaagctgaggttggctgccatccattattttggccacaaatgattgtttgtgaatgagaggatcgactacgagttgatcaaagtaggatggtaccgcgcagaagcgttcttacaattgcgataaagcaatgtaaggacgcttttttctttctaaattttaagaaaatattttgtcttggaggtaattattatgactgaattaaacgcacgacaggaagaatttgctaaggctctttttgaagcttatgacactaatacgccgttaaaagaggaagaatggaaagacgttgtgactgatgatgaaacagcatatgcagttcaagatgcggtagtaaagttaaaagggaagccaactgctggctataaagtttcgttaactagtaaagaaactcaagacatgtttgatgctgattcaccattgtatggacaacaagttgctgaacgattcctccagtcaccggcggatgttgacttgcagatgttaaatgaaccgttattagaggttgaattaaccttccgcgcaaaagaagacttacaacctagtgatacattagaagatttatttcagaaagtaactgttgcgggagccttagaattgcctgatgcccgtttcgtcgattggtttccagatttaggaaaatataatgtaatggctgattgtgctgttggtggtcttgttgtatatggtgaagaacatgatgcagatagcgtatttgaaaatgttgacgatgctgctaatgttcatgccgttttattcaaagatggtaagaaattaaaagaaggggtatcatcagaagttttaggcaatccctttaagtccctccaatggttagtacaaaaattagctgaacaaggaaaagcatttaccaagggtcaaatggtatcatccggaacatttgtcttaccacctaagctcactgctggtaagtgggaagttgagttcgatagcggtttaggaaacgttgtagttaatgcgaaataagcgttgaaagcaggtgggaaaattgggtgagaaatcgccagcagaaattaatattctaaaaattaaaaggggctgggagaaaacttttgttttctctcagcctcaaccgcttttataaacaatagtaagataacgtggaaaataaccacaaggctcgaggctaagtacgaacgataatcagcccgtgccgtgctaatcatcgttctagcttagccaaccgccttgtcgagagggttatttcccactctccttaatatttaatagctttggtgcaagtcttcaatttctgaaacttctaacccttttttctcgagtcgtttaacaatccgttccatcttttctttagtaacatcagcaggcaaggtgtataagacccgtttcattgtttcgtcttctggatcgagtgaaatgacatttacgatctgacaaaaacgagtgatttctttagcagccgttactagcgctccccgttcatcaggagtaataacagttaaaacataactcccattattcacgttccagccagcagctaacatccgtaaaagactattatgggttaaaatcccataaaactgattattgttatccaataccgcaatatatggaaggtctcgaatagcaaagaagatagagaagaaagccgcgttaattgagataaatttagtagcattctttaataatgcagttaccggtaaatgcatatccccctgtcgtgctttatgccggtaaagatgcatcttataaatatttccccgaaagatctttcctgacttatcaagaactgggacacaccgatagccggtatcctccaagacagtcagagcctcatccaatgtcgctgtttctggaagagttgttaaggttgctttgggtttgattaatgaattgaaaatcataattaacatcctttttatcgattaaatgcactcactataataacacatttctatcaaaaggattagaaaaagattagaagatttatgctgttaattcaaattagtatgctgaaaaaagtaacatagggtataatactagttaaaatttatgctggacgggaaaagtgaccgtgcggcttttttgcgtgaaaggaatgaaagaacaatgaaaatgattgttggcttaggaaatattgggacgcggtatgatgaaacccgtcataatactggctttatggtggttgatcaactagcacgagattatcacctgggagcattcacccacctaaaacaagaagcagtcgcagttagtgggataattaatggtgaaaaagtaatgttggtaaagccgacgacgttcatgaatgattcaggacgagcagtcggaccactagtagactattatgatattgacttggataatctcgtaattgttaatgacgacttggatatgccagttggcaaagtacgtttaaaaacacatggggcttcaggcggtcataatggacttaaaagcattatcagcgcgttaggaaccaagaactttaaccgggtaaaagtagggattgaccatccccaacatggaacggtggttagtcatgtcttaggtaaattttctaaagaagaacgtcctaaatttgaccaagcagttgaacaagctgagcatgcattagaagactggattaatggagaagactttgccaaattaatgaatgcttataattaaaatagaaaggtggcgttgatggtgcaaatagaaaatttaatcgagaagacgccatcatttaaacaaattacggctgacctccaacccaagaaccatcaattaataacggggatttctggatcagcgcgaaccgaattactaagtgctctttctaaagaagggcagcgaccaattctagtagtgaccgacacgatttcccatatgcaggaattggctagtgacttggagaaccttcttcctgctaatcgtgtttaccagtttccggttgaagaggttttagcagcggaagtagcaactagttctcctaactatcgtcttcagcgggtactggccttaaatgcgttgattaataaagaaccggcagttgtagttgcatctgctgcggggttacgacgcaatattatttcaccagaatactttgcccagtcctcgttaaagattaagactggcggggaagtggatccagcaaaaattcggcaacaattaagcgcaatggggtatcaatatcaaaaaatggttttgcgtcctggtgattttgcaattcgtgggtcgattattgatatctacgccttaaacactgataatccgattagaattgatctttttgatacagaagttgattcacttcggtattttgatgctagtactcagcggagtattgataatgttgaagaagttcagatactgccagcgacagattttattatcccatcgactgaattttcgcgggtgtatgaagcgctagatactgaatataaaaaggtggggaaggagttaagtgctgacgatgcggatattaaacagcaggtggctaaccgctttgaaccattattgaacgcacttaagaaccagcacttgcctaatgaacttttagaatttagcaacctggtttatccggctaagcattccttatttgattatcttcctgatgatgggacaatttactttgatgacttgacgcggataaagcaatttgccaagcagatgacccaggaagatgcaggctggtttaaagataaggttgctcaccatcaattaacggatgttccagatcttagcaatgacgtatcggccataataaaaaaagacccgcatccgcaaatttatggcgccttatttaaaaaaggtctcggtaatattaaacttagccaaattaccgacctaaaaagcagaaccatgcaacgtttctttggtcaaatgccactgctgaaagccgaacttcagcggtggattgatcaagggcaaacggtagtactgatggctaatagtccagaacggcgaaagcaaattgcccaaacgcttgctgactttgatatcaccgcaacagaaactgaattaacaaatatcaagccgaatgttgttcaaattgttgctgctaacttaaacaatggatttgaaatgccacttgctgggctggttgttattacagaaagcgagatgtttaagcaggtaaaaaaggttcatcatcgtccacaaaaacttgccaacgccgaacgattaaaaaattatactgaccttaaaccaggtgactatgtagttcatgtcaatcatggaattgggatttttagtggaattaagacgatggaagttgaccatgttcaccaagactacatgatcatcaattaccgagataacgctcagatatatgtgccagtaacccaactaaatcttgtccaaaagtatgtatcatcagaatctaagaccccgcatatcaacaagcttggcggtaacgaatgggcaaagactaagcggcgcgtttcttcaaaaattgaagatatcgctgatgaattagttgacttatatgctaagcgagaagcggagaagggatatgcttttccgaaagacgattatctccaaaaacaatttgatgctaattttccatataatgagactcgtgatcagttgcggagtattgatgaaattaaagaggatatggaaaaaccaaagccgatggatcgactgttggtaggggatgtcggctatggtaaaactgaagttgcaatgcgggcaatttttaaagcagtcactggaggaaagcaggtggccttccttgtgccaacaactgttcttgcccagcaacactacaacaccctgatgcgccggtttgagggcttcccaatcaacattgccttgatgtcacgtttcaagacgccaaaagagctaaaagagacagaagcagggctaaaggatggaagcgtcgatgttgttgttggaacccaccgaatcctatcaaaggatgttgaatttaaggaccttgggctgttaattgttgatgaggaacagcgctttggggtaaaacataaagaaaaactaaaacaattaaaaaataatgttgatgttttaaccttgacagcaaccccgatcccccggacattacacatgtcaatgctgggcgtacgagatttatcagtccttgaaacaccgccagctggtcgttacccaatccaaacctatgtaatggagcaaaatagtagtgcgattcgcgatgggatcattcgtgaaatgcaacgcggcggacaggtttattaccttcacaatcgcgttcatgacattgaagagacagtggcgtggttacaagaccttgttcctgaagcccggattggctatattaatggtcagatgagtgaaaatgaactggagacagtcctctatgagtttattcaaggaaattatgatgtattagtgactacctctattatcgaaacgggggttgatatcccaaatgctaatacgctctttgttgaaaatgctgatcggatggggttagctcagctatatcagattcgcggacgaattggtcgtagtaatcgggtggcttatgcttactttatgtatcagcctaataaggtcctaacagaattaggagaaaagcggctagctgcaattcgtgattttaccgagttgggatctggatttaagattgcaatgcgagaccttgctattcggggagctggtaacctcttggggaaacaacaacatggatttatcgattctgttggttatgacctatattcagcgatgcttagtgatgcggtagctaaaaagcagggtaagaagcaaactattcactccgatgcagaagttgagttaggggttgaagcttacctaccaacggattatattgcagaccaacggcaaaagatcgaattatataagacaattcgccaagctaagacagatgaagaagttattgatattcaaggtgacttgattgatcggtttggcgattacccggcaccggttgggacgctgttgcttgtcagtcaattgaagaatcatgctgacctggcaatgattgctgagattaagcggcaacgtgataatattaatatcaagtttactgaacgtgctagccgcttgattaaagcccctgcaataattaaggagctagctaatacgcgatttaaagcaacaatcggtgaagacaatcagcaactaacgattcggctggttattcaacctaaaatgactactgatgattggcttcaccagctactacaatttgtaacgactttaggaaacgttattcaagccgatgaaaaaggagcggaaaaatgagattagataaatttttaaaagtatcacggattattaaacgtcgatcaattgctaaggaaatcgcggatcaaggacggatcttaattaatggtcaaccagcaaaatcatccagtcgggtagcggttggtgatactttaacaattaagtttggtaataagacagaaacagttaagattaatcggattgttgaaacgacgaaaaagagtgaagcggaagatatgtatgaaattgttgatgaaacttacgcggaatcctttgaccaactataatatcttctgagatataaaaaagttgataatcatatggacattctccgcggtatcttgctatacttaaagcgtgataagttaaaatggaggggaatgtcagatgaaaggacaatctgatagcaaagtttcacaattaaataccccatatgcccgccaggtttcgaatcaaaaaacatataatcggcatgtgcataagcgccgttgtcagcggattattgccgtttttttggttatattcttaatctttggaattcagatatttcaaagcaaacggacattagcagatattaatggcaatattcgacaagcacaatcacaattaacaaaacaaaaacaaaagaatcaacaactacaacgtcagattaaaatgttgcataatcccgaatatattcagcaggttatccgtgctaagtataattactctaagaagggcgagataatctataatttgaactaatgatcacaaaataggatgtttttagtagggttagaatattttaaatgttaaaattgagaatgtaattgggtgatttttcagcttagttttttatgagaagtttagttattttcatacgttttcaagatgaagttatgatatactcaaatacaaaaatatgagatggttcaggaggatctataggtttcatggcaattgaagttggagcaaaggtttcaggtaaagtttcaggaatcactaattttggtgcattcgttgatttagatgataatcagacagggctagtacacatcagtcaaatctctgataaatatatcaaggatgttcatgatgtattggctgtcggggatgaagttacagcaaaagtaacacggattggtgatgacggtaagattgctctttcaatcaaggctgcagctcctcgtgaacatcaagatcatcatgaaaataaccatcatcgtgaaaataatcaccgtgattttcaccacgaacggaataataatttccgtggtcacaatgataacttccgtggtggttttagtggtcgtcaccacaacagtcaccaacacgaagactttaatgacatgttagctggctatttaaaagaaagcgaatcacgtttatctactttgaaacgtcaaactgatggtaagcgtggcggccgtggtggtcggcggagctaatatggcggatttacaacaagcatttgagcgacacctagtaaggagtcgcttttttgctacccaagataaggtggtagtggctgtctcaaccggagtcgattcgatggttctgttagatctcttgcaacatttgccgttaaaatatcgtccccagattatcgttgcccatatgaaccatgagttacgaaaacaaagccagcttgaagaacggttcattcggcagtattgtaaacaaaatgatttaaaactagcagttgcacactggccacaagatcttcatccacagaccggggtcgaaaacgctgcccgtcaagcacgctaccaatttttccgggaagtgatgaaagataatcaggcaagcattctgctaactgcacaccaccaaaatgatctagcagaaacaatgctgatgaagatggctcgtggtggtcagttgagtcaattagtgggaatacgagatcggcgaccatttgcttctggaaccttaattcggccgcttttaccctttagtaaacagcagttaaagaaatatgctttgcagcatcatcttaagtggtatgaggataagacaaataaggacttgaacattcaacggaatcgatttcggcatgcgataattccaatgcttgaagaagagaatcctcagttgctttctcacctcgaaagctatcatcaacagttaacggatctccttgcctggcgtgatcaagaagtggcagatcaattagcagcatgtgttgatcaacaaggaaggatgatcctggcaagattattgcaaaataaggaaatcattcgaaaagaaattttacgacaatggtttaatcaacaaggaatatatgatattaaggaccagcaacttgatgaactgctgcagatcctagaaaacgagcaaaagccacagcaaatcattgagttgccgcatcgatatattcttgagaaagcctacgctacttgtgtgttaaaaaaattggataatccgcttgagaacctacaaaagccccaagatcatgtgataaaattggaacaatggtatcaagtagatccaataaacttaatggcagtgtcagctgaaaagtcgtttttcaatgatgaagagcaggtagttttgcaatggcttgctccagatcaatttccgctgcgtctacgacaatggcgacaaaaagatcgtattcgcttaaaaaatggtcatcaccagttagtcaagcgggtcctaattgaccaaaaagtttcccgaaaacagcgtgaccagcaaatggtcctagttgatgcgcatgacgaggtcgtctggatagttaaccgaaagtggagttggtttgaacggccaaccggctatcagcagacatgtcggtcatgttttattggaataaaaaataaggagaagaaggtaaatgaataacgatattgagcgtgtcttatacagcgaagaaatgcttggcaaacgaatggacgaattagcaacggacttaacaaaagattataaggataaacggccaattatcatttccgttctaagcggagcagttttatttactgttgatatgattgaacggctagatatcatggcccaaatcgactttattgatgtttctagttattttggtggcttaggttcgactggaaaagttaaacttattcatgatttgaaaacagatgttaaagatcggcatgttctaattatggaagatattgttgataccggtcatactttgaagtacttgatggaccttttagccgaccggggagcaaagagcataaaggtttgttcattattaaataagccagaaggtcgggaagtagatgtcgaacctgattatgttggttttacggttcctaaagagttcttggtagggtatggccttgattacaaaggattctaccgaaatttaccgtatgttggaattttgaagccatctgtataccaaaatgactaaaaatgttagataattaggatgacggaaaaatcaatattaaatggacggtattttaaagatattcttaattaacgtccatttttatggatccgtaaatatgtagtatgtattattaataacattggcgataaaactattaattcttctgtaaaattaatggtcaatatttgtcaaatatgctatgataatgactacaattataaaatatcgttgctggtagataggaggttgttatgaacaacaatcgtaaaaaaaataattttactcataacgttctcttctatgccgtgatgttcttgtgtattatgggaatcgcctacttcttctttgggggcaatgcctcaacaggacaaagtaagacagtttcccaaagcgagtttatctccgaactgaagagtaataaggttaagagcgttcagcttcagccaaatggtggggtatataaggttacgggtacttaccgtaaacctcagtcaaacaatgacaattccgccaacaatactggctttgctcttacaccacaacgaaacaataaggtaactcaattccaaagttctgttttggaaagtgacgtaactgttagtcaacttcaaaactatgctaaccgtcataatgtaaagattagtactcgtgctgaagaatctaatagtgtctggatgaacctgttgttgactgtcttgccattggtcatcatgattttcttcttctacatgatgatgggccaagctggtcaaggtgggggtggccgtggagtgatgagctttggtaagaccaaggccaagccatctgatgctaagaaaaacaaagttcgtttctcagatgttgccggtgaagaagaagagaaacaagaattggttgaaatcgttgaattcttgaagaatccaaagaaattcactaagcttggtgctcgtattccatctggtgttttactggaggggcctccaggtactggtaagaccttgctagctaaggcggttgccggtgaatcaggggtaccattcttctcaatctctggttctgactttgttgaaatgttcgtcggtgttggtgctagtcgtgttcgtgacttatttgatcaagccaagaaagctgctccagcaatcatctttattgatgaaattgatgccgttggtcggcgccgtggaaatggcatgggcggcggtcacgatgaacgtgaacaaaccttgaaccaattgttagttgaaatggatggtttccaaggcgatgaaggaatcatcgtcatggcagctactaaccgttcagatgtcttggatcccgcccttttacgtccaggacgttttgaccgaaagattttagtaggtcgtccagatgttaagggtcgtgaagccattttacgagttcatgctaagaacaaaccaatggcaagcgacgttgatttaaaggaaattgctaaacagactcccggttttgttggggctgacttagctaacctattaaacgaagcggccttattagctgcgcggcggaacaaaactgaaattgatgctgctgacttagatgaagcagaagaccgggtaattgctggaccagctaagcataaccgtgtccaatctgaacaagaacgaaagactgttgcataccacgaagcgggtcacacgattgtgggtcttgtattaaatgacgcacgagttgtgcacaaggttaccattgtcccacgtggtcgcgcgggtggatatgctatcatgcttccacgtgaagatcagatgttaatgtcgaaaaagaatgcgatggaacaaatcgctggtctgatgggtggacgagctgctgaagagcttgtctttaagtcacaatcttcaggagcttcaaatgactttgaacaagcaacccaaattgctcgttcgatggttacccagtacggaatgagtgataagattggtccggtagaactgcaaagttctggtcaggtctttacaggtcaaggctatgaccaatcaccttactccgaaaagactgctgctttagttgatgaagaagtacgtcgaatcttaactgaagggcacgaaaccgccttacacattattgagacgcaccgtgaacaacataagcaaatcgctgaagcattactcaaatacgaaacgcttgatgaaaaacaaattcttagcctttataagactggaaaagttcctgataaggatgtggctgctgaagacgaagaggcacgtgcacaaacctttgaagaatccaagcgtgaacttgaacgattggaaaatgagcgtcacgatgaagcaaaggataatcaaaatgattcatccgatactaagagtgacaactcaaatgattcacaatcaagtgatgattcagacaattctgaagacaagtaaactattgaaaagacggaagatacaaaacctgattggtaggtggtgatcttccgttttttctttaggattaattttaaggagaaatttaaaatgaaaacaacagattatttagtaaagtcaatgactaaggatggaaagtttcgggcttatgctgtaaatgctacccaagtcgttcaaaaggcacacgaaattcatgatacatggagtgcttcttcggctgcccttggtcgaacgttaattggaacgattctcttggctacttctagtttacaaggagaagcaggaatgacggttaagattcagggaaatggtccagttggctttattattgcggatggaactgctgaaggaaccgtaaaaggctacatgggtaatccacacgtttctttaccagccaatgataaggggaagatcgatgtcgcaaaggcaattggtaatcaaggaactctttctgtaaccaagatggctcctggcgacaagacaccatataccggcgaagtaaatttagtttctggtgaacttggtgatgactttacttactaccttgctcaatctgaacaaattccttcagcagttggcctttcagtattcgttaaccctgatgaaaatattgacgttgctggtggcttcatgattcaagtaatgcctggtgctagcgatgaagaaatcagcaagcttgaaaagacattgaagagcttgccattggtatcacaaatgttacgtgatggtgatacgccagaagatattttaaagaaaatttttggtgatgacttaaagatccttgaaacgatgccggttcgttatgcatgtgattgctcgaaggagcgttttgcacatgcccttgcaagtatttctaaagatgatatgaagaaattgattgacgaagaccaccatgcggaagctgtttgccaattctgcgggaagaagtacgaatttagcgaagacgaattaaagaagatctacgcggaaatgactgcaaatgatgataaaaaatcaacagatgaaaagtaatttttggtgctaagcgtgttgatatgctatgatagttgagttatcggacaattaaaaatgaaactggatggccagcacagtttcttaagcagtaatgaggtgaaaaaatgaaatggaagatcggtaacgttgaaattcctaatcaagttgttgttgcaccaatggctggagtaaccaattcagcctttcgggttatctgtaaaagatttggtgctggctacgttgtctgtgaaatgatctcagaccgtggcattgtgtatcataatcaacgaactttaaatatgatggatgtcgacccggaagaacatccaatgggaattcaaatttttggcggaaccaaagagacattagttgaggctgctaagtatgtagatcaacatacagcagctgacgtgattgatataaatatggggtgtcctgttaataaggttgtaaaaactgacgcgggtgcacggtggttactggatcctaataaagtctatgaaatggtgtcatatgttactgatgctgttaagaagccagttaccgttaagatgcgaactggttgggacgacaagcatattttagctgttgaaaatgctttggcagctgaacgtgcaggagctagcgcgattgcgatgcatggtcgaactcgaaaacaaatgtatacgggacaagcagattggaatatactaaaagaagtagcgagtcaattgaaaattccgttcatggctaatggtgatgtgaagacaccagaagatgctaagaagattcttgatatgactggcgcaaccgccgcaatgatcggtcgggcagcaatgggtaacccatggatgctaaagcggactgaacattacttagagactggtgagctgctcccggaagcaaccccagaacaaaagattgaaatggccaaagatcatcttaatcgtttagttgatttaaagggtgaatatgttggagttcgtgagttccgtgggttatccacgtactatatcaagggtattccgcgtgctgcccggactaaggtagcgttagtcgaggcagaaacacttgatgaaatgaacgatatttttgaccgctttgctgaacaaactgcagaacgagctgcaaaaagacagcaagcttaattacgaggaggagaacttaagtgtcacaagaactagatcaaatgcgcgttcggcgtgaaaaaatggaagagttaaaagaagcggggattgaaccgtttggccgtcgcttcaaacgagaccatcttgcccaagacttgcatgataagtttgatcaatacgataaagaagaattaaacgagatgggcgccaaagtaattattgcgggtcgaatgacaagaaagcggagtagtggtaaggctggtttcgctgactttgttgatcggactggtaagattcaagtttacgctcgtaaggatatggtcggggatgagccttaccatgttttcaagcggtcagatattggtgacttccttggaattgaaggggatgttatcaagacggatacaggtgaattaactgttcgtgcacataaaattaccttcttgtcaaaagcattgcgtccacttcctaataagtgggatggggttactgatcctgaaactatctatcgtcagcgctaccttgatttaatttctaacccagaaagtttcaagcgtttccaccaacggacagcgatcatcaaggccgtccggaagtacatggatgataatggctttacagaggtagaaaccccaattttgaacactcaagctggtggtgctaatgcgcgtccatttatcactcaccacaatgcgcttgatattgatatgtacttgcggattgctaccgaattgtaccttaaacggttaatcgttggtggctttgaacgggtatacgaattgggccggattttccggaatgaagggatggaccctcaccataaccctgaatttactacaatggaaacttatgctgcttactttgacttccaagatgttatggatgaaacagaaggaatcgttaaggcagcagctaaagttgtttcagatgatggaaagattacttaccaaggacatgaaatcgaccttggagggaactttaaacggatcacgatggtggatgccgttaaggaaaagactggcattgacttcagcgatgaatcaatgacggacgaagatgctaagaagttagccgatgaacacaaggtcgaatataagccttactggacaaaggggcatatcttgaacgcattctttgaagagtttgttgaagatacacttattcaaccaacttttgtctatgaattcccagttgaagtttcaccattagcaaagcggaatgctgataatcctgcgatgactgaccgtttcgaattgtatgttgacggtagcgaattggcaaatgcctttagtgaattaaacgatccaattgaccagaaggaacgttttgaaatgcaagcaaaggaaaaagctaacggtaatgatgaagctgaaccagtcgacttagattacgttcaagccctcgaatacggaatgccacctactgggggacttggtattggaatcgatcgtcttgtaatgctccttactgatgctaaatctattcgggatgttattctcttcccaacgatgcgtccggaaaaggaaactaagaacgattcaaagaaaaagaagaacaagaagaagtaagctgaatggttgatgaaaaattagcataaatagataactcgtattccatttttatggggtgcgagtttttctgttttagttatgttagaataactatcaatttagaggagaaatgaggggaattgatgggagaattagaaaagttaaagcaagactgtatagtaaaacaaaagcgtgggttgcatataataattgcttcgatcgtagtatggggcggtattcttgcagtagaactacttaatgttcccgttcttactaaaaacttattcgtatttgtctgtacggccttacttttaccaatatcttatttcatatcgcgattaattaatgtggattttcaaaataagacaaatccgttaactaagttggggatgttattttcgatgaatcagcttttgtatcttctaattgcaatgtggatttatccgactattcccaataaaatgctaatggtgttagcgataatatttggtgctcatttactgccatatagttggttgtataattctagggcttattttatttcatcgatagtaatttcaatattagctttattggtgggaactaattttaaaccgtttattttagcatcagttatgcttaccatagtagtagcattttgcattaccttaatattagaaaatcatcaacttgactgaagggctccgatccgtaaagaagatcgaagccttttttactatattattttaattcttgtgaaacttctaatagtagaaaaaacaattgcaaaaagagactaatagttatcaaggaatgttcctaacaatctatccaagaagatataaaaattgaattggtccggctattcagctactgatttaatggctgaataataatttccagcgttaagataaaaattgaatgggtaaatatatcgagttactaaccgagtttaatattgatgcttttctccatactaattaggtgattttcgggatggaaaagaaatgctaattggtaagaatggtaaaggaggcaggcaaacttattaaaggaatagtgagtttaagaagctaatagatagcgatgaaaataaaattcaaaaaagttgaaaaaaggtgttgacgaaagaatgaaatccatgtatagtagttatcgttgtcaaaacagctaagtgctgttgagatggtttaacaaaaaagttaaaataattgttgacatcgacttggcaacatgatatattaataaagttgctgattgagttatcgatcaaaagaaattaaaaaataatttaaaatttcttcttgacaagttaatccgatgcatgatataattaaattattgattggctgcttaattagccgacaggtagacctttgaaaactgaacaaagtttcgacgaatcaaatgtgtagggtcttcaatcacgatgtgatttgaagcaaaacatttgcgaagtcaattcgcttaataacaaagataattgagagctattcaagttcttatatattttatatgagagtttgatcctggctcaggatgaacgccggcggtgtgcctaatacatgcaagtcgtacgcactggcccaactgattgatggtgcttgcacctgattgacgatggatcaccagtgagtggcggacgggtgagtaacacgtaggtaacctgccccggagcggggataacatttggaaacagatgctaataccgcataataacaaaagccacatggcttttgtttaaaagatggctttggctatcactctgggatggacctgcggtgcattagctagttggtaaggtaacggcttaccaaggcgatgatgcatagccgagttgagagactgatcggccacaatggaactgagacacggtccatactcctacgggaggcagcagtagggaatcttccacaatgggcgcaagcctgatggagcaacaccgcgtgagtgaagaagggtttcggctcgtaaagctctgttgttggagaagaacgtgcgtgagagtaactgttcacgcagtgacggtatccaaccagaaagtcacggctaactacgtgccagcagccgcggtaatacgtaggtggcaagcgttatccggatttattgggcgtaaagcgagcgcaggcggttgcttaggtctgatgtgaaagccttcggcttaaccgaagaagtgcatcggaaaccgggcaacttgagtgcagaagaggacagtggaactccatgtgtagcggtggaatgcgtagatatatggaagaacaccagtggcgaaggcggctgtctggtctgcaactgacgctgaggctcgaaagcatgggtagcgaacaggattagataccctggtagtccatgccgtaaacgatgagtgctaggtgttggagggtttccgcccttcagtgccggagctaacgcattaagcactccgcctggggagtacgaccgcaaggttgaaactcaaaggaattgacgggggcccgcacaagcggtggagcatgtggtttaattcgaagctacgcgaagaaccttaccaggtcttgacatcttgcgctaaccttagagataaggcgttcccttcggggacgcaatgacaggtggtgcatggtcgtcgtcagctcgtgtcgtgagatgttgggttaagtcccgcaacgagcgcaacccttgttactagttgccagcattaagttgggcactctagtgagactgccggtgacaaaccggaggaaggtggggacgacgtcagatcatcatgccccttatgacctgggctacacacgtgctacaatggacggtacaacgagtcgcaagctcgcgagagtaagctaatctcttaaagccgttctcagttcggactgtaggctgcaactcgcctacacgaagtcggaatcgctagtaatcgcggatcagcatgccgcggtgaatacgttcccgggccttgtacacaccgcccgtcacaccatggaagtttgtaacgcccaaagtcggtggcctaacctttatggagggagccgcctaaggcgggacagatgactggggtgaagtcgtaacaaggtagccgtaggagaacctgcggctggatcacctcctttctaaggaataaaacggaacctacacatcgaagaaactttgtttagttttgaggggtttaccctcagagcttgtactttgaaaactaaatactatctaatttctttattaacaaaacaataaaccgagaacaccgcgttatttgagttttaattaacgaattataatcgctaactcaattaatcagacaatctttgattgtttaggttaagttatgaagggcgcatggtgaatgccttggtactaggagccgatgaaggacgggactaacaccgatatgcttcggggagcggtaagtacgctttgatccggagatttccgaatggggcaacccaatcagcttagtcgctgattacttgactagtgaatacatagctagtaagaggtagacgcagtgaactgaaacatcttagtagctgcaggaagagaaagaaacatcgattccctgagtagcggcgagcgaaaagggaagagcccaaaccaacaagcttgcttgttggggttgtaggactgaacattagagttaccaaagtgcgacgtagtcgcaacagttgggaagctgtgccatagagggtgaaagccccgtagacgaaacgtcacactctctgttcaggatcctgagtacggcgggacacgtgaaaccccgtcggaacccgcgaggaccatctcgcaaggctaaatactccctagtgaccgatagtgaaccagtaccgtgagggaaaggtgaaaagcaccccggaaggggagtgaaatagttcctgaaaccatgtgcctacaagctgtcggagcccgttaatgggtgacggcgtgcctcttgcagaatgaaccggcgagttacgattacatgcaaggttaaggtggaaaaaccggagccgtagcgaaagcgagtcttaaatgggcgtaaaaagtatgtagttgtagacccgaaaccaggtgacctacccatgtccaggttgaaggtgcggtaaagcgcactggaggaccgaacccgtgtcagttgaaaatggctgggatgaggtgtgggtagcggtgaaattccaaacgaacttggagatagctggttctctccgaaatctctttaggggagccttgaggtaaagaatcgtggaggtagagctactgtttggacaaggggcccgtcatgggttaccaacttcagataaactccgaatgccatcgatttatactcaggagtcagacgatgagtgataagatccaccgtcgaaaggggaacagcccagatcaccagttaaggtccctaaatatatgctaagtggaaaaggatgtggagttgcatagacaactaggatgttggcttagaagcagccaccatttaaagagtgcgtaatagctcactagtcgagtgatcctgcgccgaaaatgtaccggggctaagcatattaccgaaactgtggatgtgcactatgtgcacgtgataggagagcgttctaagggcggcgaagtcagaccgtgaggactggtggagcgcttagaagtgagaatgccggtatgagtagcgaaagacaggtgagaatcctgtccaccgaatgactaaggtttcctggggaaggctcgtcctcccagggtaagtcgggacctaagccgaggccgagaggcgtaggcgatgggtaacaggttgagattcctgtaccagttaactgcgtttgacgatggagggacgcaggaggctaagcaaaccgtacgactggaagagtacggccaagcagtaagtcaggatgtgagtcaaatgtttacatccgtgttgacaagctgtgatggggagcgaaattaaagtagcgaagttgccgatgtcacactgccgagaaaagcttctaaggagtagttaactgcccgtaccgcaaaccgacacaggtagtcgaggagagaatcctaaggtgagcgagagaactctcgttaaggaactcggcaaaatgaccccgtaacttcgggagaaggggtgctggccgcaaggccagccgcagtgaataggcccaggcgactgtttatcaaaaacacaggtttctgcaaaatcgtaagatgaagtataggggctgacgcctgcccggtgctggaaggttaaaaggatgggttagcttcggcgaagctcagaattgaagccccagtaaacggcggccgtaactataacggtcctaaggtagcgaaattccttgtcgggtaagttccgacccgcacgaaaggcgtaacgatctgggcgctgtctcaacgagagactcggtgaaattgaaatccctgtgaagatgcagggtacccgcgacaggacggaaagaccccatggagctttactgtagcttgatattgagtgtttgtactgcttgtacaggataggtaggagccgtagaagtcgggacgctagtttcgacagaggcgctggtgggatactacccttgcaatatgaccactctaacccgcagcactgaacgtgctgggagacagtgtcaggtgggcagtttgactggggcggtcgcctcctaaaaggtaacggaggcgcccaaaggttcgctcagtatggttggaaatcatgcgcagagtgtaaaggcacaagcgagcttgactgcgagacagacaggtcgagcagggacgaaagtcgggcttagtgatccggtggttccgtatggaagggccatcgctcaacggataaaagctaccctggggataacaggcttatctcccccaagagtccacatcgacggggaggtttggcacctcgatgtcggctcatcgcatcctggggctgtagtcggtcccaagggttgggctgttcgcccattaaagcggtacgcgagctgggttcagaacgtcgtgagacagttcggtccctatccgtcgcgggcgtaggaaatttgagaggacctgtccttagtacgagaggaccgggatggacataccgctggtgtaccagttgttccgccaggagcaccgctgggtagctatgtatggacgagataaacgctgaaagcatctaagtgtgaaactcgcctcgagatgagatttcccatttccttcgggaaagtaagacccctcagagatgatgaggtagataggatggaagtggaagtgccgtgaggcatggagcggaccattactaatcggtcgaggacttaaccaaggagcggtaaggtttattggaagagaatagataggatttagttttgagagcacaagctctcgtccgaagggacaaagagtgtggtgatgatggcttgaaggatacacctgttcccatgccgaacacagaagttaagcttcaacacgccgaaagtagttgggggatcgctccctgcgaggataggacgttgccatgcgttattccggcatagctcagttggtagagcacctgactgttaatcaggttgtcgtcagttcgagtctgactgccggagtcgatgaagatgttgactaccttcggttagttaacatctttttttgccaacttagctcagctggtagagcatctccctcgtaaagagaaggtcggaggttcgactcctctagttggcattatgaaaggtttataaccaattagaagtctacagattaagccgataaagcttattatgtaggcttttttgtatacttaagaagttaagtgaattgttcgtaagcagtcaataacagtacgtctagctctagctaccccggatcttctatactgagactatcatcagtaaggagattttttatttatgacagaacaaaatgaaattattaccccagttttcaaaaacaagccaagtaatttacaaaagcattcttttacggcacgccctgccgtaaaaattaatgtgaatgaagtcgaattaacgattttcaaggggactaattctgttttagcttcggatatcgttaaagtggttattcgttatgctcgttaattggcatgacccagattatatctatttagtctgtggaaaaacagacatgcgaaaaggtattgatgggctcgcaatggtaatcgctgagaactatggattagaattatataataattcgcttttcttattttgcggcggacgtaatgatcgctttaaaggattgttttgggatggcgagggctttattatgctctataaacggtttgaaaatggccaccttagttggccgagaaacagtaatgaagccaaagaattatctgctcaacagctcgactggttattgcaaggactgaacccattaccaattcgtaaaattcaagctgttcgaccaggaagtttttattgagttacctctatttaaaagaagaattctttgatataattaccaaagaataattcaaaggaggtgacgtaccatgaagcaaacagcggaagaacaaatcaaagaacttaaacaacaattagctatggccaatgaaaagattgctcaattaacagctattatcaaacttcaaaagaaccaaatatttgggaaaaaaactgaagtaatggagcccatcgttgatggacaacaatccttatttagtgagcaagaaatggatcaacttcaagatcctgatatttcagtcacggaagtgactgaaaagaaaataaagcaagtggtgcgtcaccggaaagcaaaacaatctggtcagcggaccacttttttagatggtttaccacaggttgaagaagttattccattaaaagatactaactgcccacactgtcatcaactaatgaaaaaagtgggtcaacatgtatatagtagagaagcacggttaaaaccggctgaattatattgtgtgaatttgattcaagaaacttataaatgtaatgagtgtattaattctaatggtagcgatgtacttgtcagtagtaagatgccacagagtcttttaccccatagttacttttcgagtactattttagctaaagtagcagagttgaagtttaatcttgctttaccgtttcatcgtcaaattaagttttggcaagtcgtcggcttacgagttgatgctcgattattggcgactaacatcattaaggttagtcaaacctaccttgaaccgttatatgattatttacaggaattaatcagaaaagaatcggtaattcatatggatgaaactccattcaaggtaattgatgagcctaatgaaactggctacttttgggtaacgcgatcaacaaaagaattcagtaagcatcaaattatcatgtttcattactataatacccgcgcgggtaaaaccattggtcaaattatcggtcatcaatatcgtggaattattatgtgtgacggttatggtggatatagtgatcgattatatccccaggcaaaatttgggtcatgtttagttcatattcgacgtgaattttatcacattacatgtttattgaataaggagcaattgaagaactccaaagcataccgagttttacagctaatgcgaccgatctttcatgaagagaaacaattaacatattccaatcataaggaaaaactagtgtaacgtcggttgcacgtgaagcctttgatggataagttatatacttatttagaaaatatcagttttcctcaaggacggttgaaagctgccattaataatgctttgaagctaagaaagcgagtatatcaaatatttgaagatggtcgagtgccgttaacgaataatccggttgaacaagcgattcgtccatcaactcttattcgaaagaatagcttatttgcgaaaagctctgctggagctcagtcaaataccattttctatactttggtggcaactgcaaaccagaaccatttaaatatctacaaatactttaagtatctttttgatcacttaccaaaccgcaaggacgcaggactttaggcttatttgccatggtcaaaagaaattcaagcaaaatgccataaataaaacggggtcatgaattaccattttcggtagctcatgatcccaattttttcaatccgtactgttattgactgcttacgatccaccacgctcaaggcgagaaataaaattaattgatagattgcttaactcagcaagttgttgttgggtcatatttaattcatggcgacggttagcaatattttttcctaattgttgttccatagttgattattccttgttttttattttaagggtaatatgattatatactaaagtcgctaaacggatcgaacaaaaagagaatatgatttattgaaacttaatctcagctaaaaatcagtacctaaccttcatgttattacattggttcaacaaaagtaagctgttaaaacttcttatgattaagtagagcagaaaataaacaaactcctacttgaaaatatttctagacaaattttaaattagcttgacgggtataaggatataatatataatgatatccgttgagttattccggcatagctcagttggtagagcacctgactgttaatcaggttgtcgtcagttcgagtctgactgccggagtcgataaagatgttagctgtttggctagcatctttttttataccttctaaacatctttttaatattctaaattgcatatctccagtttttaacgatagattattaatttttatatcaaaaaaattgtagaagttttaacatgagaatatactaaaactgtaactagtttcatatgtagtttaggagaatggaggtatttataatgcgatttagtaaagcaatccttgttgcaacaagcataattgcaattgggctatgtacaagtggctgtagtagttttagcacgagttccaacagtagcaagagcagtaagtctcatcagcaaaaaagaggagtcacatattgtgggctcgtatcgtgatgatgccgatggagctgctattacccttaattcagatggaactgggacatatgtaatggaaaatccgacgcagactgatatattcttgatcaattgacctggaaacaggaaaagaataattacatcattaatttaaatgatagtaattatgatacgccaattgatgcgcggctaaatgaagataatttgagccttgtaggtaacgatgaatggcctaatcagtcatttaaacgagttcatggggactttgacgttgataatttctcaaaagaacaacatgcgaaaactaacagttctacaactaaggatactcattctaaggaatcatcgactcatgcccgcgcagcacttaaaaatgggcgagtgaccaccacaaagacaccagcaagattgataatttgaaggctacgactgacctatctgagccagatgaaggttgggcctgatgataatggaactgaatgtgccattgttcgaaatggaaaagtttacccacgtccggttattgatggtgatacgtcatctaattaataatcttagcgacaaacttaataaaataaacaattatagctcatacatgcgtttgcgttctcatcaaaaacttatttttcaattgacgatgttttgaaacacgtttataatagtactattctgaattttattgttaaagttttttaatgtttagaatacgtattcaattaacattgtgctaattgaaaagtgaaattatttggaggaattgtatgagtaaacaaaagaatttggatacctccttctttggacaaccgcgtggattgtcgacattgttcttcactgaaatgtgggaacggtttagttactacggaatgcgggctatccttctattctatatgtactacgctgttaccaagggtggtttgggtatggaccaagctaccgcagcatcaattatgtcaatttatggttcattagtttacctggccagtgttgtcgggggatggttatctgaccgtgtatggggatcgcgtcgaacggtcttcatcggtggtgtccttattatgtttggacatatcgctctgtcattaccatttggtgtgtcagcactttatgtatcaatcgctttgattgttattggtaccgggttattgaagccaaatgtttcagaaatggttgggggcttatatagtcctgaagatcgtcgtcgagactctggttttagtatgttcgttttcgggattaacttaggggccgctgttgctccttgggctgtcccttgggctgctaatggctttggcttaaaccttttccatggtgaaatgaacttccacgctggtttctcactagctgctatcggaatgttctttgggttagtacaatatgtagttgacggccggaagtatctttcaaaagatagcttatatcctgatgatccgatcgataaggaaagtttacgtccagtaattatttggtcaattgttggtgttattgcattagtgatcattcttggattgcttgcggcaatgggtcaattaaacatcaataatatcattacaatcattacggttattgctattgctttaccaatctactactttgtaatgatgttgaattccaagaaggttacaaaggatgaaaagtcacgggttgttgcttacattccacttttcattgctgctgctatcttctgggcaattgaagaatcaggttcagttgttttagccctcttcgctgaacaacggactattttacacattggtggctggcactttgctgctgctaacttccagacattgaacccattattcattatgatcctaacaccatttttcgttgcactttgggatcactggaaaaaacaaccaagtgctcctggtaagtttgctgctgggttagtaattgcaggtctttcatatgtttggatggcacttccagcaatgattcacggtacaactgctggacgggttagcccattctggttagttggttcatggttcattgttgaaatcgccgaaatgttaatttcaccaattggtctttcagtaactactaaacttgcaccaaaagcatttaagtctcaaatgatgagtatgtggttcttggcggatgctgctggacaagcggttaacgcccaggttgttaagtactactcatcagctacagaagttccatacttcttaattatcggggcagtaagtatcgtcttcggattgatcctttgcttattcgttaagaagattcatggcttaatggatggtgtagactaaaaattatattaagagatcgagaataattcttggtctctttttttatgaggtgagttatgaaaatcgcagtaagcagtgaccttcatttagatttaaatcatgctgatgttgcagaaattattactcaacaggcgcattatttaacccgtcaagaaattgaccattacttttttgtgggggatgcctttaatgattttgcgcaaaccagcgtatattttgcggaactacaatcgcaattgcctatcacaaaggtccattatcttgccggtaaccacgatatgttagaaggagtcacttatgagcaattagaaaatttggatgatgatctatattttcataaccgatttatcgatattccccaaacaaactggcggattatcggtaacaatggttggtatgattattcgttttcaacgtatgaaagtaatgtaaaaggggtcgcaaaatggaagcgggcatattgggtggatcgtccaattatgcagccaatgaatgatccagaacgaatggcgattgttttacaccaagttgaagaaaacctaaaacaggctcgcaatcaacaaaaacaggttatctttatgacccacttcgcaccgattagagaagctctcccgcatccaattattgagtcagcacggcggcagcggatgtgggagatgacgacagcaatgttgggtagtagacacttaggagcattactcgctaaattcccggaagtaaaagcagttttctatgggcatcttcattatgctcaatcattaattactgttggaaatattgaataccgtaatcaagcagttggcgtaagacgcaaaaatagtgagaactggaaggggaaaagcctattagatcaatggattagctgcctttatactaaaaaaatctagttttttcaaaaaaataagaaaaaatacttgcaatgaggttggaaattaggtattataataaacgttgattgatacgaaatatttaatcaagcaacttcttggaggagtagcgaagtctggttaaacgcgacggtctgtaaaaccgttccttcgggttcggcggttcgaatccaccctcctccatctttattattgggctatagccaagcggtaaggcaacggtttttggtaccgtcatgcgctggttcgaatccagctagcccaactgttattgaaaggctaagaaaaacatctgtttttcttagccttttctagttcaaaattttattaagctatatgaaaaaaggaatgacagccaatgcctaaacaaggtcattttgcaaaaagcatgcgaactaaacaaataaatgattttaaagtgaaacgcaatgcgactggtgcgaccattgatgatgaacagttaacagatttcctagtggttcgctttgctttaacagctaagaagagggttcaatctggggctcgagaaactgctcaacggttcttgattgaaatttgtgattctttacaagaaaatgatggggatttacaggcgatcattccaaatttactagtgagtcttaatgcccgggtaccttggcaattctatccaaaaattctgggagagtgggatttgcttcaaaagtttttacaaaaagaacttcctgcagttccgttagaaaaacgtctacgaattaagcacccagtcacaacccaggaaatggagacgttaattgcaaaattattggtcagaaagattactgcaattacgtttattaatcagccgggagttgatccacataaaaaagatcagatggtgacaatgatgctgacaacgatctatcatgatcaaacgattgaatgggataaagtacggttgttactggcgccatttaagtttgaaattgcccctgaactagacgaagaaacgaaagactggttaaagaaattagcagaaaaataataacgttgactttcgttctgcttccttggtagaattaaatcgttattgcagagctgtggtggagtttttatcaccgtggctctttttattttgatttgaaggaggaagcgaaaagcaatggcagaaaaaaactattcacggatttatctcgcaattggttcccttgcattactaacgtttatcggaattttgaatgaaacatcgatgaacgtcacatatccagaactatctgctcagtttaatgtatcactcgatgttattcagtggattacaactggctatttattgatggtaacaattacgatggggacaactgcctatctattacgccaatatcaagcgcgttggttgcacttatttgcagtatcatttttcattattggtgacttgatgtgtgctttgactggtaattttcctattttgttaacggggagattgattcaagcgatggcaactgggttagcaaccccaatcatgttccatttaatttttacggagattccgcgtgaaagaattggcatgatgaccggaatggctgcaatggttatttcgtttgcaccagcactgggaccaacatatggtggggtcatttcagaaatgctgtcatggcggatgatcttttggattttactaccaattgttttgattagtcttgtatgtggtcaactttttattcgtaataaaccacttggaaatgataaagcatttagttatggaagcttgattacactggcaattgcccttattagtataattagtgcagtttcttcaattgggaaacaaggatttggcaagcagttttggcttttattattggtagcaattattttctttagcacctttatctatatcaataatcatggtaaatcagaattgtttgacttaaaggtgtttaagattttcccattgcggctatcaactgtcacttattttaatttacagtttattaatattggaatttcgcttgttattcctatttacgttcaatatgttttgcactcttcggcaattgtcgcgggtcttattttatttcccgggtcattaatcggtgcttttatctcgccatttgctggaactttggctgatcgttatggttttgctacgccagttatttccgggggattcttttggttattgggacaagttgcttcagtattttccaacgtcatttaacgccattactaataacgatcttctttgttattttgcgaattgggtttaactttgctttttctaatacaatttccaatgcttcaatgttggttcaaccgcaaaatgcccctgatgtaaactcaatttttaatatggtccaacaatttgccggctcactgggaactagtcttcttgcctccacaattgctttattccaaatgggcaacagcggttcactgatgggacgtacatatgctggaggacgatttgactttatcttattgggcgttttggcaatcattactttattaacaatggttactaactatcgcatgcaacaaaagaaggaaagtatttctcaataagtggttgaattagcctgacaagaatgtaataatgtggcttgattaatacaagttattacaggtttttaaagaaagtgactataagttaaaatgatacattctatcgttcactttatggtgagcaatcaggtttttacgctgtttatttgtcttgcaattggctttttgattggcaactataaaattgcgggtaaatttaatattggagcaacggtgggaacgttaattgtgaccctaatcgtggggcaaattgggagttttccccgggatgaaatgttgggaacgattttctttggcgccttcatgttctctgttggttatcggatcgggcctcagttattagttagtttgaaactatttgggattcgaattttaatcgctagtattttctggatggttgttgcattcttagttgggtggagtcttttttccgcctttaagattggaccagggatcgctgccggggttatttcgggagccctcacccagtcagctaccgttgccagttcgttgcaaacgattgggtcattgccagtcagtcaaagtgttagggcaacttatgaggctcaactcccagttgcctatgctttaacatatgtttttgggacattaggggtaattatctttttacgtgacctagcacctaaaattttggggatttcaattgctgaacagggtcctaaaatggctgaacattatcactttcatgctaaaaacccgaacccaacgtggcgacgaacatatcgcattgcaaatgattcaccgcttgtcggcaaaacgcttgaggaattaatcgacggtctaattaccggattattgggttagctgcttttcatgatggcaaaatgactgaccaccttgaatatcaattgcaggctggcgacttgctaactgttattggttacgctgttcatttcgatcggttgatgcgagtaccaggattaacagaagtattgacgccaaccaatgcgccgcgtgaacgagcttttgttctgggaaaaaactttaaaccgggtgaattagcccttctacggcaacatggggtttttgtgaacattcaagacccatcagtggaaaccaacaattgattaaccagttgcgaccaggggatgtgatttcattgactgggaatacatcacgaaccaaagcaatcttaaaaaagatgggacgctggaaagctgcagatacagcgatgaattattctttattctctttaggaatcggttgtgcttcccttttaggaattatcgggctaaaattaatagtattccgttgcaactaggaaatggaacggcggctttaattatgggactaatcctgagttcatggattgagcgtcaccgtccgtaaatcaatccctgtaacggtaactagctttcttcagagttttggactaacgctttttgtggggacagttggtttacaatcagctcaagcatttacaagtgcaattaagtcgttagggatcggggtcttatttattggggcgatgatttcaataatgccacatttgctaacgctgttctttggacgctatatattgaagatggaacctcttgctttaattggtgcgttgactggttcaggaacgattgcagcggcaatgaatgagatttcgcaaaaagcagggccggaaggtggcgcatattatgcggctgcctttactccggcgtttgtagttggtaatattggaattacattactagggccgatttttgtggcgctactatcataatttatcgcttagaaagggcgtgcaaaattataatgcaacaattttttacaattttaggtggaatggggacgctggcaacagagagttatgtacgtctgttagataaaagaacgccaattcatcgtgatcaagattacttaaactatttagttgttaaccatgcaaccgttcctgatcgtactacatggattctcgatcatagtcaaccagatcctaatgaggccctgattgaagatattaaacagcaaagtcttttgaatcctgcattctttgttttaatttgtaatacagcccattactcttttgataagttacaggcagcaacggagattccaattctcaatatgctgcaagaaacggttaacgagatcaagaagattaagccggatgcaaagcgggttggtctattagccactaagggaactttggcagctaacctatatgatccttatattgagaaggctgggtacgaacttatcaagccaactcctgagattgccgatatgacagaagacctgatttaccatgatatcaaagaggctggtcattccgatggcaagaagtatcatgagctagtacggaaaatgattgaagaacaaggagcagatgtagtagttttgggttgtactgaattatcttttgcagaagagatggatcctgaaactaagtaccctgttgccgattcacaatcaattattgttgatcgctcccttgaacgagcattgaaattacgacaaaataataaaaattaaaaattagagaccagaaaggtaataattccaacggtctctaatttttattaattttttgccgatattttaagaaattggtctagatttttgggaatggtgtaaaatatacacatgcgcaatgtttagcaaacaatggcgtaaggaggaaagaaaatgagttcacctgtttatattcaaattcataatcggttaagacaaaacattgaagatggtgagtggaaagttggcgataaaattcccgctgaacgcgaactcgctaatgattttggcgtcagtcgaatgactttgcggcaagcaattcaagcattagttgatgaaggaattcttgaacgaagagttggctctggaacttttgtcgctaatcgcaaagtccaagaaaagatgtcaggaataacgagctttactgaattaatgcacgcgacagggaagaaagctgctagtaagacaatttcttaccacttgacgatcccttcgcaaacagaggttgaaaagctaaagttagccccagatgaacaggttttacgaatggaacgggttcgttatggaaatgatgtgccaatttgttatgaaatcgcaactgttcctgctaacctcgttcaaaaatttagcaaagaagaaattaccacgtctttttatcggacgctagaaaaaaaggcgaacctctatcctggtcatgcaacccagcatatttcagcaacgaaggcgacggaaaagattgctaattacttgcagattaagcgtggagatgctctcttgcgaatgacccaactatcttacttgcaagatggtcgtccttttgaatatgtccacactcaatatgttggatcacggtttgaatttgtctttgaaaagtaatcaagacaaatccatgttacaatactgattaacgatattacttttgagaggaattatactaatgaaatttgattatccggatgatagccttaccctgcatactgatgcgtatgaattgagtatgatgcagacctactggaaaaaaggaatgggtaaccgccgtgctgtctttgaggccttcttccgtaaaatgccatttaataatgggtacgctgtttttgccgggttagatcacattattcgctatgtaaaacaattacattttactgatagcgacattgaatacttaaagtctacgaatcaatttgatgatgactttctagaatatttacgtaactttaaatttacgggttcaatcaacagctttgaagaaggagatctggtatttaaccatgagcctattattcaagttgatgcgccgattattgagggccaattgattgaaacggcaatcttaaatattcttaattatcagattatgattgcgacaaaggcttcacggattaagtcaattgttggtaaccaaactgtaatggaatttggctcacgtcgggcacaagaattggatgcagctttgtggggaacgcgagcagcatatattggtggcttcgatgcaacaagtaatgtccgtgcaggtaaattatttggtatcccgatttcaggaacccatgcccatgctcttgtgcaggtatacatgaatgattatgacgcatttaaagcatatgcagaaactcatcataattgtgtctttcttgtggatacttttgataccttaaagagtggggttcctaacgcaattaaggttgctaaggaatttggcgataaaattaactttatcggtgtccgcattgacagtggtgatatggcctacctatctaaaaaagtacgcaaaatgttggatgatgctggtttcccagacgcaaaaatcatcgcatctaatggcttagatgaaaagacaattcaaaacttgcaaatgcaaggggcgaagattgatacatggggaatcgggactaagctaattactgcctatgaccaaccaactttaggggccgtatacaaattagtcgctattgaagatgaagatggccaacttgttgatacgattaagatctctaataatgttggtaaaatgtcaactcccggcaaaaaacaagtatggcggattaacgatcgtggagacggcaagagtgaaggggattatattacattagttgatgaggatcctcgtaatgaaaagtcactcaatatgttcaatcctaacttcccactccagcaaaaagacgtggaagattttactgcccggccaatgctaaagccaatctggcaagatggtaagtatgtttatgatgaaccgaccttagaggagagtcgtcaacaccgtttcgatagcttaaatgctttatgggatgaatataaacgcgatttaaacccagaagtatacccagtcgatttatcacagaaatgctatgataacaaacttaaattaattcaccaagttcatgaatatgttaaatcattgaataagtagaggtaatctgtagtgcgaaagtatcaagaagaaataattaatgcattaggcgttaactcgcaaattgatccccaagcagaagtaactaaacgtatccagttcatctgtgattttctccaaaccactaagatgaaggccctggtattaggaatttctggcggtcaagattcaagtttggcggggcggctttcacaattggcagtcgaaaaactgcgggaagagactggcgacaatgaataccaatttatcgcagtccggttgccatatggtgagcaagctgatgagtcagatgcaatgtttgcaattaatgacttcattaaacctgataaaataatgcgggttaatattaaggcggctactgatgcgatggtagtatccttaaacgaagccggtacgccaattagcgattttaataagggaaacattaaagcccgggaacgaatgattgttcaatatgctattggcggagaaaacaaaggagccgtagtgggaacagaccacgccgctgaagcagtaactggtttttatactaagtttggggatggtggtgcagatattacgccactttctggattggataagcgacaaggaaaagccttattacaatacttaggagcaccagcaaaactttatgataaaacaccaaccgcagacttggaagaagacaaaccaatgcgtcccgatgaagaagcgcttggtgttcgctatgatgaaatcgacgactacttagaaggtcgtgaagtttcgccagcagctgctgaaaaaattgaaggctggtatcgtcgaacccaacataagcgccacttgccgattgctccatatgatacttggtggaagtaaattgataataaaatgggaggctgggaatcaactcagtctctttactagttttaaggagaatgataatggaagaggaaacacttcagcttgttagcaaacaattgccagatattcgccctcaacaaattaaagcggccctcggattaatggatgagggaaatacgattccttttattgcccgttaccgtaaggaaatgacgggcacgcttgatgaagttcaattgcaagcgatccgggatgaatatcaccgggtaacgacattacgggaacgtcaagcaacagttatcaataaaattaaagagctcggtaagctaacaccggcgctcgaaaagcaaattaacagtgcaactgaattgcaagaagtagaagacctttacttgccatataagcaaaagcggcagacaaaggcccaacaagctcgtgaacatggcttggcaccgttagcaaattggctgctatcttatcccgatgatgatttaagtgcgaaggcgcaagagtttattaacgatgatgttcctgatgctgaaagtgcattaacaggcgcccatgaaattttggctgaagcaattagtgaaatggccacggtacgaagctggttgcgaaattatactgctcaacatggtcaattagagacaagcgtaaaacgtgatggtgaagaaaaggatgaactggggacttacaagcagtactatgagttcactagtccagttcagaaattgaattcttatcaaatcttggcttttaaccgcggagaaaaagaagggattattaacgtcaaaatcactttagctgaagaaccagtgatgaattaccttcgttttcgtttgattaaaactagcaagaaaaatgatgcgactgcctttattgaggaagcttacaaggatgcttacaagcgtttcttgggtccagcaattgaacgggaactgcggcgacaattaacagagggcgctgatgaacaagcgattaaggtctttggtgaaaatctctatcatttattgatgcaagcaccaatcaagggaaaagttgtattgggcttcgatcctgcctaccgaacaggctgtaaattggcggttcttgatgaaaatgggaagttcttaaccaaagcggttatttatccgcataagccagcgccagaaaagcaacgagccgcagcggaaggcgaatttattgatttgctagagaagtatcatgttgaaatgattgcgatcggtaacgggacagctagccgggaatcagaacaatttgttgcggaagctcttaaaaagatcaaacggccaatctattatgtcatcgtaaatgaagctggtgcctctgtttactctgcaagtaaggaagcgcgtgatgaatttcctgacttgcatgttgaacagcgaagtgcaattagtatcggtcgtcgtttgcaagatccacttgccgaattagtcaagattgatcctcaagcggttggggttggacaataccagcatgatttgccgaagaaagaattgagtggggaactggaaacgattgttgaacgggcggtaaaccgggttggcgttaacctcaatacagctagttaccaattgttgacgcggatttccgggcttaataaaacaattgctaaaaacattgttacctatcgagatgaaaatggccgctacacaaaccggacacagttaaagaaagtgccacggttaggacctaaagcttatcaacaatctgttggtttcttacggattattggtggcgaaaatccattagataacaccgatgttcacccagaaagttatcaggtggcggaaaagattattcaagcggcaggaattaatgtcgatgagttaggaacgccaagtgctgatgataagttaaagaaaattgatgttaagcagttcacggatgatcaagtcgggactgaaaccgttactgatattatttcttccttgcaaaagccaggccgtgacctgcgtgattcaatgcctgctccattattacgccatgatgtaatgacgattgaagaccttaagccggggatgaaacttcaaggaactgtccggaacgttgttgactttggagcctttgttgatatcggtgtcaaacatgatgggttagttcatgtttcaaagatgagtaagcagttcattcgtgatccgcgggcaatggtagccgttggtgatattgtggacgtgtggattgatgatgtcgacttgaagcgtcagcggattcaattaacgatgcttgaaccggagacagtcacaaatgactaatgcagaattacaacaattgaccgaacagtggtcgaaagaatactttgggcgcgaatttacgcacaaggtattttttaataagcggttaaaaacaactggtggacgctatcatttaagtgaccatcatattgatatcaacccgttaatgtatactgagtttgatcttcataatctgcgccaagtggtccttcatgaattgtgtcattatcatttacatctgttaggaatggattatcaccatcgcagtagagaatttaagactttactagcacaggtgggaggatcaagatatgcgccaccgactagtaaaagaaagataaattccaagaaaaaatggcattatatctgtactggttgtggtgttgaattcgcacgacaacggcgttttaacacccaaagatatatttgtcgacgatgtggtcacaaatttattttaaaaaattgaaaaaagttgttgccaacgaataggtatcttgctataataatattcgttggttgatatgcggccgtggcggaactggcagacgcgtaagattaaggatcttatggtcgattatgaccgtggaggttcaagtcctctcggccgcactacttaaaaggcactgagcaatatttgctcagtgccttttttgttttaaaatttttgttcaataaaatttacgtaaattttacctctcctcttgctatcccaatcatgaaagcgctatactttagatgttgtagatagtaatgaggagggatttattcatggatgcagatatcaaatggcttgatgaaccggaaacattccgggttaatcaattacctgcgcatagtgaccattattactacggcaactatgatgaatggcgtcataataatagtcgttttgcgcaaaacttggatggtcaatggcaatttaactttgctgaaaacccgcgtgaacgtgaagaagatttttataagacagattatgatagtagtagttttggaacaatcgaagtccctagtgagattgaactaaataattacgcccaaaataattacattaacactttgattccgtgggaaggtaagatttaccgtcgtcctgcatatgcccttagtcctgatgatgcgcaagagagatcatttagtgatggggatgataatactgttggcgaatacttaaaacgttttgaccttgatccttccttacggggaaagcaggttcgcatccggtttgacggtgtcgagcgtgctatgtatgtttggcttaatggtcactttattggttacgctgaagacagttttaccccctctgaatttgacctgactccttacattcaagatgaaggtaatgttttggctgtggaagttttcaagcatagtaccgcctcatggattgaagatcaagatatgttccgtttttctggaattttccggagtgtaaacctattagcccaaccacttgttcatgttgaagaccttaatattcggccaattgttactgataattatcaggacggtatttttaatgttgaccttcaacttcacggtgaaaagaccgggaacgttaatgtgcgggttatcgacaatgatggtaatacgctcgtcaatgaaacacaccctgttgactccacggtagaagttcgggatcaatttttagaaaatgttcacttatgggataaccatgatccttacctctatcaattgttgattgaaattcgtgatgacgaaggtaatttggtcgaactcgttccataccactttggttttcgtcgaattgaaattaataaagatcatgttgtcttattgaatggtcaacggctaattatcaatggtgttaaccgtcacgaatgggatgctaaacgtggccgtgcgatcacgatggatgatatgacgagtgatattcaaacctttaaggaaaataatattaatgccgttcggacgtgtcactatccagaccaaattccgtggtattacctttgtgatgataacggaatttacatgatggccgaaaataatctggaatcccacgctacctggcagaagatgggagcaattgaaccatcatataacgtccctggttcagttcctcaatggcgtgatgtagtagtagatcgggcacggactaactatgaaacatttaagaaccacccgtcgattttattctggtctttaggtaatgaatcatatgctggcgataatattgtcaaaatgaatgaattctataagaagcatgatgacagtcggcttgttcactatgagggtgtttgtcatactcctgaataccgtgatcggatctcagacgttgaaagctggatgtacttaccacctaaagaagttgaagagtacttgaagaacaatccagacaagccatttatggaatgtgagtacatgcatgatatggggaactctgatggtggaatgggttcgtacatttctttacttgataaatacccacaatactttggtggcttcatttgggactttattgatcaagccctccttgttaaggatccggtaagtgggcaagaagtgatgcgctatggtggtgatttcgatgatcgtcactcagattacgaattctcgggagatggcttgatgtttgctgatcggacaccaaagccagcaatgcaggaggtaagatactactatggcttacacaaataaattacgcgtgatatatggtgatgcgacattaggacttagtggtgacggctttcattatatttttagctatgagcgtggtggactagaatcgcttaagctaaacggtaaagaatggctatatcgtgaaccaatgccgacgttttggcgggcaaccactgataatgaccgaggaagcggctttaatattcggtctgctcagtggttagcagcggacacttttcataagtgtgttgcgattgacctgacagttgataatcaacactttgccgaattacctattgcgccgataaccaatgaatttagtgatccggtatctgctgagaatgtcaagattaagtatacttttgagacgctaacagttccggctacgcaagtcactgtaacttatgaggttaacggacaaggtgagattaaagtgacaatgcactactacggtcataaagacttacctggtctgccagtagtaggaatgcgttttatcatgccaaccgttgctaccggctttgactatcaaggattatccggtgaaacttacccggaccggatggcaggagcgactgagggtaccttccatgttgacggcttaccagttactaagtatctagtccctcaggaaaatggaatgcacatggatactcatgcattaacaattacccgcgattccacccaaaataatgctgatcattctcgggaaccatttagcttaactattaaacaagacgagcaaccatttgccttcagttgtttaccatatacagcggaggaattagaaaatgcaacacacatcgaagagctcccactcgcacgacgaactgttctcgttattgcgggaccgttcgaggtgttgggggaattgatagctggggagcagatgttgaagaacagtatcatattcctgccgaccgtgatgttgagttttcgtttgtattgaatacaaaataagaggttggattatattccatgccgctatgttcgtaaaaagttgtataacaaaggtctctaacacccggtaaatccgaacgttagagacctttttgttttaattaatttgtccagctgcaatcccttggaagtatttcttaatatgagtacagaaataataaaggccataaattgcaagtatgctaagaccaactaatgagatcactaataaggcggtgaaccatttagcttgcttaaagtagagggtaacggtatttttccctttacgttgctgaacgtaaggggcaccaaccgaggatcgctgatagtggcgaagtagatgagcattagccgttaattgtgattcatgatacgtaataattggcaaccgaacttttcccgcttttcctgcttcccatgataattgcaatcctccatgcggcaagacagtatgagtatatttatgggcttcattaataatttgcccttcgtaagcgtaagaacgaacatatttttgattcatgtacttcttagggatcggcaaatagtcaggacttctcttctcaaccatcgttaacaattgaccagggtaaagatcatgaacggaatgtcgcagtgcggccttattttcacttacgcgggtaatcgcgctaaaactattaagaacaatttctgagtcatagcgggctgcacgtttataaacatcaattgttgtaggagtaaagaccagaaaaaccattagcaagaggataccggtgattaattgatttcgtaagtcaatctcttgcgcttttttatcaagggttgtagcgctgatcccaactcctgcgagtaagaggggaaaggcaatgattgtcaatcggttaggaaactgtaaagtgtgtccaagtgcagggaccacatcttggaaaaaggaccaaggagtaagggaagaactaagcaggaggaccaaagaaccaagtaacgtcaggactgtattagtaagcgattttttgaaggtgaataatacgtaaatgagttgaaggataaagagaagccacattgcgtagattagataatcgcgtgtactgctaaacattgaaggcagtagcacattatcggcgaggctaaaatcggcaggatgggcaatattattatggaggttaagcattaataaggctccccaaacattagccgttaaaataatagttccgccgactgccttcagcgtttcgatccacattttcttacggttagtcgttataattaacccaataataaagaacggtgttagtgtaatcacaaaaaataaagaacttagcatatggatctgaatgataatcgtcatcagggtcatcaattgtagccagttgactggtcgttggtgatcctgaatcatacgtacgccgcaaattaccatataaggagccagagcagctccccaggcattcatgttctgtgctaattcccatcgtggaagccacccaatgttcatatagattagggcacagataattgcaaatgtccgtttactatgaacgcggatgctaagttgatacataccgattccacctaatagatagacgataaaggtagtgacgatctgatattgataccaagttcctactacgccgagaatagccccatttaaatatgcaaagagggggccataaacggcattgatgatgcgaccactttgttgaaaactataattactttgaaaatagctaaaattaagctgttgaatttgcttagctgcatcgtaaaaacggttaaagtgaaaaatggagtccgtccctaaaataactccatgtgatacaaactgggggaacatgattaaataggccattgcagcgatggcacagtatggaagcccccaattaattagattagcaattttagatttcataaaattgagaattaaaccaaatcagtttaatttttcctttcctcaaatacttaccttaataattatacggcagaaaagtcgactgtaaaataaccttctgcagctagtttaattgttaagcactagtaaaatgcgctattataagcatagtggcaaaggggagtgaaaaaatggcagaattagtaattgtacgtcatgggcaaagtcaagctaaccgtgataatatttttactggctggactgatgttccgttgactcctaaaggaattgaacagggtgaattagtcggcaaggaattgctaagactgggtatccaatttagtgatgcgtatacgtcttacatggaacgggcaatcatgacgactaatattatcctagaagaaattaatcagttatatattcctgtccataaaacgtggcgactaaacgaacgtcattatggagcattgagtggccggaacaaagatgaagtgaagaaagagattggtgcagaacagcttcataaatggcggcgtggttttaaagatttaccaccacaattaaaagaacgtcagcatgatcaccgctatgatcgcttaggagttaagattccgcttagtgagagtttagaaatgacgctccaacgactcctcccatattggcaagaccatattgcgcctcgtttgattgatggacataatcagttaattgttgcccatggtagttctttgcgggcactaattaaatatttagatggtatttcagataacgatattgataaagtggaagttccaaatggcaagccaattttatatcgctttggtgatcaccttaatgtcattaaaaagacttttataacaatggatggtgaaattgatgacaatacacgaattagcaaataacccaacgttaagcggccaagtacgcttgattgaaaatattgtttatggtgcgatggatggtgaggcattacatatgtcgatcttagcaccgtggacgcaacgtttcccaaaacaatatcaaactgaacctcggccattgattgtctttgttcaaggaagctcgtggcgaaccccaaaaatgggagaagaaattccacaactggttcaatttgttcaggccggttatattgtagcgactgttcaacaccgtagttcaattgatggtcactcatttcctgcgtttttgcaagatgttaagacagccattcgtttcttacgggccaatgcgcaaaaatatgcaattgatccgcaacaggttgcaatttggggtacttcctctggagccaatgcggcaatgctagtcggcttaacgggtgatgatccgcgctataaagttgacctttatcaagacgaatcggatgcagtagatgcggtggttagttgttttgcaccaatggacgtggagaagacgtttgagtatgatgctaatgttccaggaaataagttactgcaatattgcttattggggcctgatgtatcaaagtggccagaaattgaaaagcaaatgagtcccctatatcaagtcaaagatgggcaaaactatccaccatttttattgttccacggagatgctgataaagttgttccatatgaacaaatggaaaaaatgtatatgcggttgaaggataatggaaattctgttgaagcgtaccgggttaagggtgcgaaccatgaacgagatttctggagtccaacaatttataacattgtgcagaagtttcttgacgatcaatttaaataaatttcaataattgtattgacaacttattttttataagttatgattttgacatactaagttaggaggaacacgtcatgtttaacaaacaattaattagcgctactgtttgttgttgtggatcgcgtcttatgcgacccacagtttggcgtgcttacttttagttgagtaactgctaacgtaatcgggaataaatgcataaggcgcaaattcaagtgagaagttcttgagtttgtgccttttttgtattcgtttttgcattctaaaggagatagatattatgaaattcaacacacaattaattcatggcggtaatagtgaagatccaaccactggtgcggtctcaacaccgatttaccgttcatcaacattccatcaacatgttcttggcggtgaacctaaatgggaatattctcgaacaggaaatccaacacgtgcatctcttgaaaaattaatcgcagagcttgaacatgggacagccggctttgcatttgcttctggatctgctgctattcatgctactttttctttattctctcaaggcgatcattttgtagttggtagtgatgtatacgggggaacattccggttaatcaacaaggtattaaaacgctttggccttgaatttactgttgttgacatgcaagaccttgaagcagtcgaaaatgcaattcaagataataccgttgcagtttattttgaaacgccaactaatccgctcttgcaaatcgctgatattaaagcaattgctgatatcgcaaaaaagcatggaataaagacaattgttgataatacctttgctaccccttataaccaacaaccgttaactcttggggcagatattgttgttcactccgcaaccaaatatttaggcggtcatagtgatgttgttgccggattagcagttactaacgatgatgaaattgctgaacaattagcgttcctgcaaaactcaatcggtagtacgcttggtcctgatgatagttggctattacaacggggaatgaaaactctcggtgcccggatgcgagctcaccaagaaaatgcgaatgaagttattaatttcctccaaaacgatgaccatattggaaaaatttattatccaggcttaaaagattttcctggtcatgagattgcggctaagcaaatgcggaactttggagcaatgatctcctttgaacttaaggatggtttagatgcgaaaaagtttgttgaaagtctacaattaattgatcttgccgaaagcttggggggaattgaaagtttgattgaagttccagctgtcatgactcatggatctattccccgggaaatacgattagaaaacggaattaaagatgagttgattcgtctttcagtgggaattgaggaccctgaagatattattgttgacttgcaacaagcacttaaaaaattagattaattatagaagaagggaaactgtgacttatgtgggaaattatcaagacatctttaccacaactcttagcagcgggatttaaatatacgattccgttagcgattatttcatttttctttggactgattattgcactagtaacagctttaattcgtctctctcgtcaacgtggcgcattcatgattcttaaatggattgctagtttttatgtttggctttttcggtcaacaccgctactggttcaattatttattgtattctttggactgccatatctgagaattaagggactcctgccgcatggaataaaattagaaccatttacagccggcattattacattttcacttaatactggtgcttatgcttcagaaacaattcgggcagcgatcagttcagttccaactgggcaatgggaagcaggcgcagctatcggaatgacgcggttgcaaatcttatggcgaattattttaccacaagccttaagagtagctttaccgcccttatcaaacagttttataagtttggtcaaggacacctcattggctgcttcaattacaattatggaaatgtttgctgttagtcaacagattgcggccgaaaactatcaaccattgcttatgtatactttggtagctatggtttatgcggtctttacgacaatcttatcttatttccaaggatatcttgagcgggtagtagaccgtcaagtaaatgcaaataataggtgagaaaaatgaaattaacaaatattaataaaagttttggtaataaaaatgtcttgaaaaataccacgttagagtttcctgaaggtaaaacaacagtaatggttggtccatctggatctggtaaatcaacaattctccgctcacttaacttactggtaatgccagagagcggccagtatgattttgatgatcatcatttggattttagtcaaaaagtaagcaataaagataagttggcaattcgtcaagaaacagggatggttttccaagactacaatctttttcctaataaaactgtccttggtaacattattgagggaccaacacaggttttgaaacagacaaaaaaggaagcaattgcaaatgcgaataatttacttgctaaagtgggcttagcagattacggggaagcctatccgaatgaattatctggtggacaggcacagcgggtagcgattgctcgggcattggcaatgtcaccaaagtatatcttacttgatgaaccaacttctgcccttgatccagaattagaacttagtgtgttgaaggttctattgcaattagctgaagaaaaacaatcaatggtaattgttactcataacatggcctttgcgaaacatgttgcggataagattatttttgtcgagaacggcgaaattttatataatggtactccggatgagttttttgctccagataatccaaataaacgaattaagaactttatcgcctcaatgacaatggaaaatttaaaataaaggaagtttagaataatgaaattttggaagaaagcactattaacaattgcagtcttaatggtcggtacctctgcaggaatcacaagtgtttcggctgcttcatcagctgttaattcagaattagttcataagggagaattgacaattggtcttgagggaacatactccccgtactcttaccgtaaaaataacaaattaactggctttgaagtagaccttggtaaagcagttgctaaaaagatgggcttaaaagctaactttgtaccaactaaatgggattcactaattgccggtcttggttcaggtaagtttgatgtagtaatgaacaatattacacagacaccagaacgagccaagcaatataatttctctactccatatatcaagtcacggtttgcattaattgttcctactgatagtaatatcaagagcttgaaggatattaaaggcaagaagattattgctggtacgggaactaataatgcgaatgtggttaaaaaatataaaggcagccttacaccaaatggcgattttgctagttccttagatatgatcaagcaaggtcgggctaccgggacggttaactcccgtgaagcttggtacgcttacagcaagaagaacagtactaagggtctcaagatgattgatgtttctagtgaacaagatccagctaagatttcagcactttttaacaagaaagatactgctattcaatcttcctacaacaaggcacttaaggaacttcaacaagatggaacagtcaagaagctatctgaaaagtacttcggtgcagatattactgaataattaaaaaagatctccaacgtctgtgtgttacagtgttagagatcttttttgaagggactgtgacataagttaggttacttccataaaatacgaacagcgcagtacaacaatggccttcagcgtccggcaaagtcgaacgctgaaggcctattgttgcttgcgggggctcgaaaacgaagtcacaagtgacttctgtcttgctcccttttcacaaattaatgttaaattattatgctaaagttcccattggatcccaaggcttaagaacgactgggctcttagcgtaatcacgtttaagatcttcgctaaggtacttcttattaataacgacttggtagcagtacttgtccatccaatcgtcactcataacgaagtaacctttatggccgaccttgttaccccatgagttttcaactttccacttggttggcttaccatctacaaggtcaacaccagtgataaccattgcgtgatccatcatgctttcaccataatcaagtgcttcagctttggtcatttcaagatcaacgtcaaatagtttgtcgtagtcataggtgttaagggccataatcccaagtttagtttctgaatatttaataacatctgaaccaaaccaaacactttcgccattctttaattgttcaatcgcaagctgcttgaattcatccattggtaggtttaagtgcttgatttcgcggccaccaacgacattaccaagcatatcgatggtgtaagtttggtggtacttcttatcagcagttggtgcttggatgattgaaatataatcatcaagattccagccaacatacttcttgaagaattcttgtggggtaaggttagtatcgcggtggaattcgttgtccttctttgtccgatattcgaagtcaaagtgactaaccggttcaccaaatgtgtaagcaagcatccggtaattctcgttcaacatcttccggcgcgtttcgttaattgcttcttcatttgcatgatcttcgttaatcatttttcgcaaaataacggcatcgtgacgaagcttgttgtttaagacttcatcaattccccgtgagttagaagagttaaatgattcgggcattgcggcttttggcataaccccatacttgctgataagggcgcaaagcatatcccattggccaccatcgttttgtggttcgttcattaaccatgaaacttttcggctgtcggtaggctttttagcagtcttaattacgttttggtagaagtaattagatttttcaaacttatcccagaagaactggtaggcttgggaaagttcaaaattatcaggtaagttaaatttttgctgcatatcatgacgcattgtgttcagtgctgcaaacatccaacaacgaccggattgtttttgatcagcaacgtcccccgtcttgaggtcaatagagaaatgaggagtattatcagcaattgaatgccaattaaagcttgcattccgtaccccgtttttggtaacagtattttctaagacactgctgttagggtgatgacggtagtttttatgaaaactagcgatatcttctttgttaattgaaaagctcatttgcaatatctcctttgaatagattgaattaacgggcgtgcaatacctttggaccttctggagtaccaacaattacgtcgttaactcgatttaagaataaaccagtttcgacaatcccaaccatgtggatcaattcatcggctaaggccttcggatcgtcaatttcgccaaggtgaaggtcaataatatagttattttcatcagtacggaactttttatctccgtccatccgccaagttggcttgtagcctttcttttcaagaaggtcaaagacatgttgggaaccaaatgggattacttcaaccggaagagggaaagcaccaagtttatggacgagtttgctttcgtcgacaatccacattactttatttgaggcattggcaacgatcttttcccaaagaagggcaccaccgccacctttgataccttggaagtcatcactgatttcatcggccccgtcaatagttaaatcgatgtggtcaacgtcatcaatatctttaattgtaattccgaggtcgcgtgcttgcttagcagttcggtttgaagtcgttacaccgatgatatctttgattttaccttcttggacttgcttaccaagctcatcaaccatatatttaacggttgatccagttccaagaccgacaatcatcccagatttaatgtacttaactgattccttacctgtttgttcttttaatgcattttgatccattaatattccccctaattaaagcgatctgcaactggcaatagttgctgatattctggatgtagtttgaattgcgctaccgcatatggacacatgagcttgacaatgtattgttcttttgttgcataatccacaaattgacgtactaattcagctgcaattccttgcccacggtaagttggttgcacaaaaacgcgttcaacgacaacgtgatcatttgtatctggaacttttggaaaactgatctcgccaactaaaggttcttgatcgtcaaaagcaatgatccgctgaccatcaactcgatattgcatataaacacatcctttcataataattttcgataaactgcttttaaaagtcaagttatcaaagcgataccattaatttattatctagcatataatagtatactggaattattaagaataaaacactatgaggtgaacgtaatgaaacgtggatttaagattgtttctagtaagaaaggccaagatatacatttaccccaacggcaaacaactcgggcggccggatatgattttgaggcatcagaagattttattctgccatcaatttggaaaggcaatttcttgaaggcgctatggcaaatccatcaacaaaaaaagctaattgatgaagaatttaaggctgctgattcctgcttaaagccatacttagtacccaccggcatcaaagcctatatgcaacctgatgaatttcttttattagctaaccgatcaagtggtccttttaaacgccgcttgattctaccaaatggaatcggcattgtggatgcagattattatgataatgatagtaatgaaggtgaaatcttcttccaacttattaactatgggctgcgggattatcatataaaaaagggagaacggatcggtcaggggatttttatgccatatttaatcgctgatggtgaagaacaaccaaccgctaaacggactggtggattcggttcaacaaaagaataaataaacttagagaggaattaaagcgatggcaaaaattcgaacacaatatgtttgccaaaactgtggttacaactcaccacgctacttaggccggtgtccaaattgtggtgagtggaatactttagtggaagaacaggtagagaccagttctgcaccaaccaaaaaagcaactaccaccttaaccggcttagttgccaaaccacagaaaattaatgagattgatagtacagagactccccgtgttaaaacaaaattgaatgagttaaatcgcgttttaggtggaggaatcgttcccggatcactaattctaattggtggggatcctggaatcgggaaatccaccctccttttacaagtttctggacaattaagtgatgagcatcaccgggttttatatgtgtctggagaagaaagtgggacacaaattaaaatgcgggcggaacggttgaaagttgctggggatgacttttatgtatatccagaaacgaatatggatagtattcgggatactattcgtgacctcaagccagagtatgtcgtgattgactcggtacaaacgatgcaggcgactgatgtaagttcagcaattggtagtgtatcgcaaattcgtgaagttaccgcccagttaatgcagattgctaaaagtaataacattacgatttttgtcgttggacatgtgacaaagggcggtgcaatcgctggtccaaagatcttggagcacatggttgatacagtcttgtattttgaaggagacctgcaccatacatatcgtattttgcgatcagtgaaaaatcgatttggttcaactaacgagcttggtatttttgaaatgcatacaaatgggctgacggaagtaaaaaatccatcagaaatctttttagaggaacgattacatgatgcaaccggttcagcggtggttgtttcattagaaggaacgcgaccaattttggttgaaattcaagcgctggtaacaccgaccgtttatgggaatgcacagcgaactgctaccggtttgagccgaaaccgagtatcattgataatggcggtattagagaaacgtgctaacctaatgcttcaaaatcaagatgcttacttaaaagcagctgggggcgttaagttagatgagccagcaattgatttggcaattgcagtaagtattgcctccaattatcgggataaaggaaccaagcccaccgatgcatttgtcggtgaagtaggtttgactggggaaattcgccgggtaaaccgcattgaacagcgggttgctgaagcagaaaaacttggctttaaacgaatctttattcccaaaaataatttaaagggttggaaaccatcaactaatattcaagtagtcggtgtctcaacgcttaaagaggcgttatatttagcgctggggtaaaataaataattgaaaggatgaagcaaatgcggcgtagaatgattactctcatttatattctagttggcgcggcagtgggattttactatttgccattattatgggggattttgaacatcgctcttaatccggcattattagtatttatcgacattattattggtgcacttattttctggctattatccctcccattggttagcggcactgaaaagttgatccagcgaatcgaaaaagaactaaccaagcgtagtcctgtataccttttctttgggactttattaacgattattggcttagttttagcagttcttatttcgattccattgtggagaacgaggattccggtaattaataatattctgccgatccttctaatgattgtctttagttattttggttttcgaattggtacgacgcggttagatgattggcgtaaagcatttacccatgccaaaagtagtaaaaccgatggtggtaatgtgattgaacggcaagatgataattatcaccattataaaatcctagatacaaatattctgattgatggacgcatttatgatttagtcaaaacgggttttctagagggaacattactggttcctaactttgttttatatgaattgcaatatatcgctgattctggcgaaagtattaagcgtgttcgtgggcgccgtggccttgatattttaaacaagttacggaaagaaaaaattgttccaatcgaaatgtatgatggagactttgaagatattccagaggttgatagtaaattaattgccctcgctaaagaagtcaatggggtaattgtgacaaatgattataaccttaataaagtaattcaattccaaaatgttcaagtattgaatattaataacttagcgaaatcattacgaccacgagttattccgggcgaaacgatgacggttgttgttgtgaaaaaaggaactgaacgacaacagggtgttgcttatcttgacgatggaacgatggtggttgttgaagatgggcgttactttatggataaacaaattgaagttgaagtaactagtgctcttcaaacagacgctggtcgaatgatctttgctcgtccgcttcattcacaacgaggaattgacgagcatacggatacggaacataaagaaaaccgaaataataaagataagaaaaaataacaaagaatggctgtgaagaagaaatagagttttcttgcttccggctattttttaaaataaaaaaagaagcagctcgggaaaaagctgcttcttagggagtattacgataatcttgggggagatttcgtaaaaaagaaaatatttttttcggttactattgggaggagtaattgaaaaataataggtttcattgatgtagtaaagttcatctttactacgatatatataatagcagtagaatgtgaagaaagtatgaccaaatgttaaataattttttggatacaaattaatattatcagaaatgctattctaatacggaatgtggtaagattaactgtacaaattaattctttattaatgatttttaaggagcggatagacatgctaacaatttacaatacgttaacaagaaaaaaagaagaatttaagccattgcatccaggcgttgttaacatgtatgtctgtggtccgacggtttataattacattcatattggaaatgcgcgcagtgcgattgcctttgatacagtccgacgttaccttgaattcaaagggtataaagtaaattatgtttctaactttacagacgttgacgataaaatgattaaggcggctgccgagcaagggattaccgttccacaattagcagagaagtatatcaatgcttttatggaagataccgcagcaattaatattgagccggctactcttcatccccgggcaacggaaaacattaccgagatcattaagttcgtgcaaggattagtagaaaaaggatatgcctaccctaaagatggggatgtttattatcgcgcacgaaagtttaaccactatggacagctttctggacaatcacttgatgatcttgaagttggggcaagtgaacatgttagtgcagatgaggttaataagaaggaagatccacttgattttgctttatggaaagcagctaagcccggcgaaattagttgggattcaccatggggaaaaggtcgtccaggatggcatatcgaatgttcagtgatgtctactaagtacttgggcaagacaattgatattcatgcagggggacaagaccttgaattccctcaccatgaaaatgagattgctcaaagtgaagcagaaacaggccaaaaatttgttcgttactggatgcataatggtttcgtaacaattggaaaagacaacgagaagatgagtaagtctctccataatttcattactgttcatgaaattatcaaggaagtagatcctcgggttttacgtttctttatggcgactactcaataccgacgtccaattcaatatagtcaggcaaacttaactgatgcgcaaaataatcttaatcatattcaaacagcctttgataacttgacttatcgtgaacaagatgccgataagggagaggttcaagaagtcactgatcggcttgatcaatttcatcaccaatttattacagcgatggatgatgacatcaatgtccaaaatgggattgctacagtctatgaattagttaaatatgcaaatgtttatgctcaacaagacagtgtgagcttaggtgctcttcatgcaatcaaaaaagaacttgttgaattgatgagtatttttggcgttaagcttgaagcaagtgacaatcaaattaatgatgaaaagatcaagcaattgattgaagaacgaaatgtagcacggaagaataaagattttgcgcgaagtgatgaaattcgagacaaccttaagaaacaaggaattattcttgaagatactcctcaaggaacgcgttacaaaaaggaatagaaaggatccttatggtacaagcagattatcgacaacttaatggaattgctttggcttatttaggggatgcagcttatgaggtttacattcgtcagcatcttttaaccaagggaattagtaagccaacgaaactacaacatattgctacccactatgtttcggcaaaagcacaggcggctcttattgacttgatgaaagaagacgagttactgtctgatgaagaatggtcgtattttaaacgtgggcgaaatgctaacagtcatactcacgctaagaatacatcagttatgacttatcggatttctaccggatttgaagcggtaatgggttacctcaaattagctggtaaagaagagcgattggctgaattagcgcaatggtgtatcgaacaagtagaagcggggcgaacagcacatgaaaaatgagaatacggattttattattggccgacatccagctgtgatggcactaaaatctgaccaagagatcaataaagtttttattcagtcggggttaaaggccgatgctatttcccagattgttaaattagcgaaggaacgccacttagtagtatcgaatgttcctaagaataaattggacttgatgactgaccgacaaaatcaccagggggttgtgttagctgtagcagcataccaatatgcaactattgatgacctctttgataacgcggctaagcatgacgaagatccatttttccttattcttgatgaactagaggatccgcataatttaggttcaatcatgcgaactgctgatgccgctggtgttcatggtattattattccacgccggcgagcagtaggattaacttcagtggttgccaaaacatctacgggagcaattgaacatgtaccagttgcccgagtaacaaacctggttcaaactgctaaagaattgcaagaacgcggtgtttggctgtttggtactgatatgaaaggaaaagattaccgaacatgggatgcgcatggtgccgtcgctttggttatcggcaatgaaggtaaaggaatttcatccttgctaaagaaaacttgtgatgaaatgctaacaattccaatggttgggcatgttcaaagtttaaatgcgagtgtggcggcaagtttgttgatctaccaaggctttaactctcgtcatcctttaaaataattttgattttattgcttttaaaccttgattcgtgctaacctaagtactgtgtggaggtgataagtatgtcccagaaaaaagtagcattggaatgtacaaagtgcggtgcgcgtaattatacgattaccgctaaccctcaacgacaagaacgattagaattacgtaagttctgtaaacattgcggtgagtatactattcatcgtgaaagcagatagtggaggaaaatatgcacttaattcgatttattaagagtgttaaccacgaaatgaagctagttgtatggccaacagctaaagagaatcgtcgtgatacgactattgttgtttcattgactctgttcttcgtactattctttgctctgtttgattggttaattcaattaatgatgaaactctttgtttaacattagtagtcaaatagaaattagtttgttatactaaatctaagggaacttcgtagctattacgaagttttttattttactgaaaaatgatttgaattatgataggaggattcatcgtggaatcacatgaaaaacgttggtatgtgctccatacctactctggttacgaaaaccgggttaaaagtaacttggaatcacgggctcaatcaatgggaatggaagactacatttttcgcgtagttgttcctgaagaagaagttcgccaggttaaggacggtcaagcaaaagaaacaattgaaaagacattcccaggctatgttttggttgaaatggtaatgactgaccaagcttggtacattgctcgtaatactcccggcgtaactggtttcttaggatctcacggtggtggttccaaaccaaccccattgcttcctgaagaagttgatcggattatgaaacggatgggaaccgaaacaactgttagtgacattgatgttaaggaaggcgatactgtaaaagttattgcgggatcctttgcaaatatgactgccaaggttgtagaagttgatcacgaaaagcaaaagattaaggcgactgttgaaatgttcggtcgtgaaacggctgctgaattaggctttgatcagattgatacattttagttaatttaatattttgaaaattgttgaaataaattgagaattgtggtatgttttctaagtatgctattaacatactgtgggagaggtaaaacttactgcctcatcatgaccacaacacggactaaggaggttttgtctcgtggcaaagaaagtagctaacattgtcaagttgcaaattcctgccggtgccgctacaccagctccaccagtaggtcctgcacttggacaagcaggtattaatattatgggcttcactaaggaattcaacgcacggactgcagaccaaaagggtatgttgatcccagttgtaattactgtatatgaggaccgttcattcgacttcattactaagacgccacctgctgctgtcttactaaagaaggccgctggtgttgaacatggttccggtgaacctaacacaaaaaaggttgcttcagtaacgaaggaccaagttaaggaaatcgctgaaactaagatgcaagatctaaacgcagctgacgtagaagcagctatgcgcatgattgaaggtactgctcgtagcatgggcttcactgttgaagactaattactagcagtcgggatgcgctatgaaaatagtgcacccacgtgggaggtataactccgttagaccacatttgcaaggaggaaaacacaagatggctaaaaaacgtggtaagaagtaccaagacgcgctcaagaaagttgacagcaagaaagaatacgctgttaaagacgctgtccaattagtaaaagatattgcctacgctaacttcgactctactatcgaagtagcatttaacttaaacgttgatacaaagcaagctgaccaacaattacgtggtgccgttgttttaccaaacggtactggtaaggatcaaacagttattgttttcgctaatggtgaaaatgctaaggctgctcaagaagctggtgctgactttgttggcgacgatgatttagtagaaaagattcaagacggttggcttgactttgatgttgcaatcgcaacaccagacatgatgcctaaagtaggtcgtttaggacgtgtccttggacctaagggcttaatgccaaaccctaagactggtactgttacgatggatgtagccaaggctgtttctgatgccaaggctggtcaagtaacttaccggactgaccgtgatggtaacgttgctgtaccattcggtaaggtttcatttgatactgacaagttagttgaaaacttggctactttagaagacattgtagctaaggctcgtccagcttcagtacgtggaacatacatcaagcacgcttccatttcttcaacatttggaccaagtgttacgcttgatttaactacattttaatttaaattagttaaaatgaaaaaagactttgagatttttgctcaaagtctttttttgtttcaatttttacttcacaatagagatttgttgtgctatattattaatcaatgataaaaagattaaaaaataattagattttatcatttgagtttaaaattaattaaggagtgacgacaatgacacaatttaaatattcaaagcgtgttccagcagatggtacggatgcggttggtgcaattttacaagcagcggcggatcctaagattatttcatttgctgggggattgccggcacccgaattgtttcctgttaaagaaatgaaagcagctgttgataaggtttttgaagaacacggtcaagaagcgatgcagtatggggcagcgaagggagttacagctttacgtgaagttatccaacaacatgtaaagaaaaaagaaaatgtggattccgaattagacaatgttttagtaacaacgggatcagaacaagccttagatttagtgggcaaggcatttgttgacccgggtgatactgtattagttgaacagccaacgtacctctgtgctttagatgtttttcgttcttacggtgctaattttgcgagtgttgagatggacgaagatgggatgaagatggatgctttagaagaagcactaaaggctaatccaaatactaagctcatctatactgtgccaaacttccaaaatccaactggacgaacaatgactgaagaacgacgaaagcagttagctgaattagcagaaaaatacgatgtatatgtactagaagataatccatatggtgaaattcgttttgctggtcaacatgtaccagcagttaagtcatttgataaatcaggtcatgtcctttacatgagtacattctcaaagacgttagccccaggatttcgtctaggatggttggttgctgataaaaatgtagttaataaattgacggttcttaagcaatcagctgatctccatacagataacttagctcaattcgcggttgcccaattctttgccgataacgatgtggatgcccacgttaaagaaattagtgctttatacggcaaacgtaaagatttgatgcttgagggaattaaaaagtatttcccagaaggagttaaatatacggatcctgaaggtggcatgttcttgtgggtagaagttcctggtgttgatgatacagtagagttatttaaggaatgtcttgaacatgatgtagcctttgttccaggtgatccgttctttgccgatggagttcaacctggtgctttccgtttgaactattcaaatatgaaagaagaccagatcgaagttggtttgaaacgtttaggagcggccttaacagctgcagttaataagtaattatttcagccattaataaatacaatcctaataaaatttcgaatttaaatacttaagggagcgaggcagaagagctctcgtaaacaataataggcctctatcgcttgaaattaccaggcgttagaggcctttatattgcactatttgtcttatgtggacgtaatctgacatatgtccattccttttttagtcattaaaatgtagtaggttaatatactccctctgtactttgagttaattgtgattataattatattaattgctgaaaagttttaaatattcgggtttcttgctatctaattgggatagtaataagcattatcaaaaatttttaagggaaaaggagtttttgatagtgtcaatgatagatttcactaatacagaaatggcagtagccgttatctttactttaataataatgtttgtaatatcctttgcagttagttttttattttggttgatttaccaccaaaatatgaaaaaaggataattagagatgataattataatttttacgcttatttgggggatcgcgctgtttatatttttagtttattcattgattagtctgctatttcggatgatttcgtatcctcgggactttcattacttcgcgggaaaccaacaaccagctaaaattgactacaatttacaatattataatattatgttattgttccatgttttaatgaggcagcagttattcaacgaacaatcaaatgtttgttgcgatttaagcaatttgaaatagtggtagtagacgatgctagtagtgacaattcagttagtcagattactaactcgcatatccaccttttgcgacggcatcttcctaatgcccatacaggcaagggggatgtattgaattttgccctagattatatttgtcagatcactatccgacagagggtttcttttgaaaaggttattattggcgtagtggatgcggatgcccaattagttgataatgccctacagcgattaaatgcctatttttcctcaccaaggacgaatattacccaaatgcgagttaaaatgtatccacattttaaaaattggttgcagattttacaagatattgagttttttagtattaactatatggcccaaattatgcgaatgtatactaaaacagttggtttaagtgggaatggccagttctttcgacttaaaccaactattgataaaattagtgcgcatccatggggtaatgcgctcttagatgattacgaactaacgataaaaatgatgctgaaaaaattgcatgttgattatatgacagatacatatgtttaccaggaagcgttaacgtcccctaaaagatttgttcgacaacgaagccggtgggtacaaggcgatttaaattgtcttaagtatcttcccgagattattaaaagccgcattttaagcaggacacagaaacttggtatatattatttcctgcttcaaccatggcttgattttcttgcagacgttgcgattattattttaacgacgattgcccttactcattggtacaatttttatggccacttgactcttttgactttttcattagtgatggccggcttggtagtcttttcgttattttggagaataatatttggaatattttactatcgtgacttagctcactatcacgaacctcctttaaaaaaaacaccaattggccttattaccgcttggaatttcctatatgtatgttatcttatttttagtattataatggcttattggcggtggagttttcgccaaaattcgtggataaaaacggaacatggaaaaatgtttcttgaatagcggggagatatgatgagaaagattaaagtaatgacggtatttggaactcggccagagggaatcaaaatgaggccagtagtcaaggccttggagcaggatgatcgcttttcatcggtagttgtttcgaccggtcagcatgctgaaatgcttcaacaggttttagctgtttttaaaataacacctgattatgatttgaaaataatgcgtcctggacaaactttaacggaaattacaattgaaacgatgacgaagcttgaaccgattattcaaaaagagcaaccagatattgtgctagttcatggcgatactagttcagcctatgcatcagctttggttgccttttataatcgggttgctattggtcatgtcgaagctggtttgcgaacctgggataaatattcgccttatccagaagagatgaaccggcaaatgattgatgatcttgctgatttatattttgctcccacccaaacaagtgctaacaatctcaaaatgggaaatcatcagcatgggattatagtgacgggaaatactgccattgatgctttgcagtatacgattgaccattcgtatcatcaccaagtattagacgaaattgatcccgacaagaagattattttacttactatgcatcggcgagaaaattggggtaaaccgatggaagaaacctttaaggcgattaaagagattgtggatcaacggaatgatattgacgttatttacccggttcatctgaatcctaaagttcaagcggttgctaataaaatttttggaaacgataatcattttcatttgatttccccattagatgttgttgattttcataatattatgagtaagtctttacttgtgatgagtgattcgggtggggttcaagaggaagcaccagcacttcataaaccagttctagttttgcgtgatactacagagcggccggaaggagtaactgctggaactcttaagttaatcggtacgcaacttaataatgtaatgaaagagttatcgtccctattaaatagtcctgaagaatataataagatgagtgaggcacagaatccttatggggatgggcatgcaagcgaacgaattatagatgctattgctaaatgggcagcaactcaaaaagaattataaaaagtccctttacagaacttcagagaatatgttaaactgtaacagttgattaaatatgactctgcctaagactcaggtggcgaaagccttaatcaaatgcctgccgaggaagaaatgaaagttccttctctatgtctgcggtcatagggatttttttataaatccgatcaaaaaaacattgcaggaggtgaaaattcatgagtgaagcagctattgctaagaaagctgaaatcgttaagcaaactactgatatgcttaacgcagctcaaagtgctatcgttgtagattaccgtggtttaactgttgcggaagttactgacttacgtaagcaacttcgtgatgctggtatccaaatgtcagttatcaagaacaagattcttgatcgtgctgttgaaggtactgactacgaagatcttcgttctacttttgttggaccaactgctgttgccttctctgacgaagacccaattgctccagctaagatcttgaagaagttcgctgatgaccacgacgctcttgaaatcaagggtggtttcatcgaaaagagtgttaagactcttgacgaaatcaacgaatacgcaaatatgccaggtcgcgaagaactgttgtcaatgcttgcatctgcattgcaagatccaatgcggaagattgctcgcgcagtcaaggctattgccgacaaggaagacaaagccgcataattgccgtatatcaatacaatataaaattaaaattaattacctaaatattggaggaaataaacatggcttttgataaggatgctatcattgcttcattaaaggaagcatcaatctctgaccttaacgacttagttaaggctatcgaagaagaattcgacgtttctgctgctgctccagttgcagttgcaggtgctgctggtggcgacgctgctgctaaggacagcttcactgtagaattaactgaaccaggttcagctaaggttaaggttattaaggctgttaaggacattactggtcttggtcttaaggacgctaaggaccttgttgatggtgctccatcagctatcaaggaagacgttaaggaagacgaagctaacgacatcaaggaaaagcttgaagccgccggtgctactgttacccttaagtagtcttaaattattaaataaaaaagagttacgaaaatattgttttcgtaactcttttttatttcagggataccatatgaggtgttcttttgtaatacgaaaatagctcccaccatttattctaaataaggagctattttatgatgtgtgcaaaattttagaagaacaggaaagttaaaagtaaataaatctactttgcaggatgagtagtactatcattgcttgtgcggtaaccaaagtagaattgaatagcagcaatagcgatgttaacccagttcatagcaataaaccaaccgttaattgcgcttgcatcatgagatacaccataataaacccaaaaaccgataacaattgcacaaatattgatccaagcgaaagtcttttgtagaatttgattattaagttggaaccacatccaaatgacattaatgacaaaacaaattgccaagatccaaaaaataacattaaataacataagatatccctccttagggcctcgataaacattaataaacgcgtattgaactgatgaatagcaacattcgaaaaaagtattacgcggtgtggttagcagttgaagttatttacaatgattggtaatactttactaattttgggaaagttgttgcttagcatcttcatacccgtcaacatagtcacgaagagcatgcatcttacctttaataaacttattggtgacattaataattcgttgtggatacttcctgaaaggttctagagccttataatccttaactacttgatcataacctttttggtatgcatttgttgcaccattttggctatttgacgtaggacaatttttttgaacatctttatcacctcttttgttgtcctaccatgatagtaacaagtatacaaactcaattccaatgatatggtataaaaattaaaatattatgcattaataaaaatactggttagaaacttttaaccagcatttttattaatctttattctttttcagaagttcagtaatttctttgaggtacataacttcttcgctaggagtatcttttttgttatcttcttttttgcggaatgtattgattgcttttaccattaagaaaacaacaaaggagataatcaggaagttaatgactgcatttaggaaacttccgtatttaaactgagcatcgccgaccgtcaaaacaagattagataggtcaattcgaccaatgaataaaccaataagggggttaataaggttattaactaatgattttacgattgaggtaaaagctgcaccaacaattatcccaactgccatgtcaataacgttaccacgagcaatgaatgttttgaattcttttaacataaaatagacctccttctagctctagaggggaacaacttcaattatgattatatcaaacagaattaaatgcttagggcttttatgagatgacataaggagatttaatttatttttaaataataattgcatattatatcaaaccattatattatatgacatataatattacagctaaaaaggagggatagaatgaagattcaaattacagctgacttactcgatgggatggtcttagcaattcttgaacacaaagattactatgggtatgccttaactcagcgaatgcaatcagctattaccatttccgaatcaacaatgtatcccgttttacgccggttaaaaaaagacggttatttaataacttatgatcagccttaccaggggcgaaatcgccgttattatcaaattacggaagccggcaaggagcatttacaacgtattcgtaagttatggactgattataaaaatagtttagatggtattttttatgggttaggtgagggagaagataaagatgaatgaacgtcaaaaatacattaatgatttatcaatatatttaagacaattaactgatgaggaacgaaatgatgccttagaattttatgatgaatatattgccgatgctgggctggagacccgaacagcgattgaagaaaggttaggaacgccacgacagttaagtcataagatattagccgattattccattaaagctaataatgagtcgatcaaagaaggacaccctgcttcgcctcattctagttggcgtgtcttttggtgggtgctagtagcaattattacttccccaataacgtttgggctaggaattgccgtattggcactattgttggcagcagggggagtcgccttaagtttgattgttggaatagttgctttaatttttggggttgctgccatagcgatcgtatctatttatattggaattggtttaattgcaacaaacctgtttagcggactattttattttggcttaggattgacactgatcggcttattccttgtttgtttacctttaatttactggttaatcagagttattgttcaagggattgcgaactttgctaagttcatttatgcaaaagtgcaggcaaggaggaaaaagtaaatgaaaaaagtatttaaggtgggagtaattgttttaatcttaggagtaatcctcctcggaataggcttctttaataatggtaacaaggctgtttattttgagaacaatcgtccagcaatttttcattctcacactaaaacaataagtactaataaagcttttgaacggattgatatctcagcatcgacagctaatgtaatagttcgtgaaggcaaaaaatatcaaattacttattctggtataagcaagcattctccggccgtaactgttcataataacgttgcttcaattcgccaaactggtggctttccgcttgtctttaactttaatgattatcagccccaccaagatttaatcattgtgactatcccacatgatcaagccatagctggtcgtattcatttagagagtggtgatctaacagtttctcaagttaaaatggacaatattgatgttaacagtgatgcaggcgaggttgaataccgtcaagttacattacgtggaggaagtacaaaactctcgtcaggtaacttcacaggacatgatttaacagttcaaggacaatatactgttaataatcaatctggtgataatacggtcacaaacacaactgttgatggctacttcctaaagactgatgcaggtgataatgaacttaatggtgaagataagggtgaagaacccttacatcagaatgatgatgcagaaaatgtgctccgcttgataacgcaatctggtgataatgaagtgaattaaggtaactaagattaataaaagcccctcgatatctagaaattagatgtcgaggggctttttaataggagaaaagtcttaatttttaattatgcgctggattatttttcttcaacgccagtaccatcgtagcaacgttcaagtaattccttgagttggctaacaagtggttcaactgggttagtagtagtacattgatcttcgtaagctaagcgagcaagatcgtcaactactttatcaaattcttcacgtgtaacgccattgtccttaagactaagcttaacaccacattcgtgagcaagttcgataactttcttagcatatgcttcagctaattcttcatcagtgttgcctttcaaaccaatgaaccgtgcaatgtcagcgtagtccttagttgcatggtaagtctcatagtgaggccagagagcaagcttttgtggacgttttgcgttaaagcgaattacttgtggcattgcaatagcgataagcaaaccgtgaggaagaccgaatgctccacccatcttgtgggcaagagagtggttaattcctaagaaggcttgaccaaatgccataccggccattgttgagaagtcgtgcatcttacgacgagctaacttgtcaccttgaactgacttaggaaggttttccataacacccttgatggtttgtagtgaccaaccacgagtgtaatcagttgccataacagaaacatatgattcagtagcgtgacataaaacatctagtccagtccatgcagtagtttttgctgggacagtttcaacgaattgtgagtcaacaatcgcaatgtttggagttaaggcgtagtcagcaagtgggtacttaacatgagtttctgaatcggtaataaccgcaaatggagtaacctctgaaccagtacctgatgtagtaggaatcccaataagttgagacttagtaggcttcttgatttggtaagcacgcttccgaatatcaagatacttttgcataaccccataccatgaagtttctgggtgctcatagaacatccacatagccttggcagcatccattggtgaaccaccaccaagagcaataattgtatcaggtttgaagtcgttcatcatggcaacacctttttcaacagtgtttgttgatggatcttcttcaacgtcatcaaatactaagaaagcagtgttgttttgacgttgacgcaattgatcgataacacgttgaacgtaaccacgcttgctcattccaggaccagtaacgataaatgctcggttaatgtttggaatatcttgcaattcttttagtgagttgcgttgaaagtatacttttgggggaatcttaacccattgacggttttcacgccgctttgcaattgttttgatgtttaagagatcccaatcagtaacgttgtgagaaattgagttaccaccgtatgaaccggtacctaaagtaagtgatggtgtcatgttgttgtaaatgttaccaataccaccgataccagatggagagttaacaatgatccgtgaagcacgcatttcaagaccgtacttagttgctaaatcatcatcaagggtatgaatagcagcagtgtgaccttcaccaccatagtgtaataattgagcacaaatatcaaaggcattttcatgtgaagtagccttgtacattgttaatactggtgaaagcttttcagctgaaagtgggtacttgtcaccaaccccttcatattcagcgatgataaccttagtgttttcaggaactttaattccacacatattagcgatggcgttagctgaacgaccagcaattggtccacgaacttggtgacgcttaggatcaatgaagccttcagtgaacttatcaatttcatttggcttcaagaagtaacagttccatttttggaattcttcttttaccttgtcgtagatttcttcatcaacaacaactgagttttcagtagcacagatcattccgttatcaaaagtcttagaaagaacgatatcgtaaacagaacgttcaatattagcagtcttttcaatgtaagctggaccgttaccaggaccaacaccaagagcagggttacctgaactgtaggcagccttaactaatgaaggaccaccagttgctaaaatagtagcagtcttagggtgttgtaacaatgcacttgtattttcgcggctactttcaggaagccactgaatcatgttctttggtgcaccggccttttccgcagcttcttgtaaaatcttagctgttttaatggaagatttcatggcttgacggtggaatgagaagataattgtattccgcgtcttagcactaatgattgatttgaagatcgttgttgaagtagggttagtaactggaacgatacctgcaataataccaagcggatcagcaatagtgatggtttggttttcatcgttgtcttcgatgattccgacagtcttatcatgacggatgttgttccaaatgtattcacttgcgtagatgttcttgatagccttatcttcggcaaccccacgaccagtttcttcagctgcatcaatagctaagtccatgtggtgttcttcagcagctaaggccatggcttgacaaattttatcaacttgttcttgtgagtagtaacgtaattgttcaaaagctgcttcacttttggcaattatgtcattaactaatttttgcgcattttgctttttttcttcttcagttaatacgtttttttcaacttgttttttgttgttagcaggcataattgaaatctcctttttcaattcttttctttgttaacatttgaacatgtataatattactacatttttttgctttgtaaatacccttgtgaacatttaaacaatggttgctttgtatgaattcgcttacaatattgtcttcataatacttgtatagcaacaaaaaacattggtattatttttgagattaagagatgatagatttgtatactgttattaattgaagtctgtttcacaaatagaatataaaagcgaatatattaatttaactcggctagttattaagttaactaatcattaacagattattattgggaataataaaaaagccaccattcagaaatggtagcttttttattaatcgcgggcattaatgtcttttcccgcgtttggatctttaacgtcataatcactatcattcattgcttcaacggcacccatgcgatacccattgccgacttggctaaaaaaatcatggttagaagttgaagtagaaattccattcataacaactgggttaacatcagaagcggtatcagggaatagtggatcttgaccaaggttcatcaatgccttattagcgttgtaacggatgaaggttaaaacatcatctgtccaaccaacttgatcataaagaagatgagtgtatttttcttcattatcgtatagttcataaaggaaattgtacatccaatctttcatatcttgttgttgcttttctgttcgatcacgtaagccgacttggaacttgtatccaatatatgtcccgtgaactgattcgtcccgtaaaattagcttgataatttcagccacgttatttaatttattgtggccaaggtaataaaggggagtgtagaaaccagaatagaataagaaagtttcaaggaaaacattggctactttctttttgagcggatcttgacttggatcaaggtacatatttgcaattttgacagctttattttgcaaatattcttctgtatcggaccattcaaagatttctttgatttggtctggggtattaagagtagagaaaatagttgagtaactcttagcatgaactgattccataaattggatattattaagaactgctgtttcatgaggagttttaacatcttctttaagggcagttaatcctgcttctgattgaacagtatcaagaagggttaaaccaccaaaaacatgtccgacagtccattgatgatcgtcatctaattcacgccaatcatccatatcattggcaactgggatccgcgtatcaagccagaactgttctgttagcttttcccatgtagctttatcgatcatgtcggaaacttcattccaattaattgctttatattgatttacaggtttaaattcttccagtttcattgattgagctcctccaaatacgttgcttttaataaatcgagatgccaaaagccatttgtatacataatatcaagtttaccagtgcccaacgtttaaatcaaattctgattaggcttagataacacagctttcacattggtttgcaccaatttcatcgctatcgtcagtaaacgttcgaatgtagtaaattgacttaataccacgtttataggcatagtgccgtaagatgtttaaatcacgagtcgtcattttatctgttcgtccatttttccattcgtaaaggcctgctgggattgttgaccgcataaagagggtcattgaaagagactgatcgatgtgctgttgtgcagcggcgtaagtgtcaataacctttcgcatgtccatatcgtaagctgaacgatagtaaggcatcgtgtcgtttgaaagatatggggcagggtaataaattttaccgatcatcttttcttgacgctcttcaacacgattaatgattggatgtagactagcagtcgaatcgttaatgtaggaagttgaaccgtttggcgctacagcaagacggtattgattgtaaagaccatcttgcattacattttctttcaacttcttccaatcttcaattccagggataaaaataccttcaaaaagacctttaacaacatctgattgtggtccccaatccttagtgacatatttgttaaagtaggaaccatcagcatatttactgttctcaaaatcgtggaaagtttcctgccgctctttggcaatttcatttgatgccactaatgaccaataatttaagagcataaagtaaacacctgtgaattcaatcgcaaccgggcttccgtattgaatatggtgcttagcgaggtagctatgcaatcccattgcacccaaaccaactgaatgggcaagccgatttccgttttgaatagttgggacaacatctaggtcttctacgtcactgattcgggttaatccccgcatcattgccttaatcgatttaccaaagtcagggctttccatcatattagcaatattggttgacccaagattacaactgatatcaattcccatttcagaatatgattgatcatcatttacttgcgctggtacttgtacttgagcaatctctgaacataaattactcatcacaatttttccattaatcggattatcccggttttctgtatcaatattgataatgtaaggataacctgattcttgttgaagtttactgatttcgtcctccaagtcccgggcattaactttcttcttgcgaatatcatcgtttgctactaaattgtcgtattcttttgtgatatcgacgtaggagaatggcattccgtatactcgttcaacatcatagggactaaacaagtacatatcagcattttgctctactaattcgtaaaacttatcaggaaccgtaattccgagagagagggtctttaagcgaatcttttcatcagcgttttccttttttgctcctaagaattcaataatatcaggatggaaaacactaaggtaaacgactccagctccctgtcgctgtcccagttgattggaataggaaaaactatcttctaacaacttcattacaggaacaactccactagcagcaccttgtattttcttgattggggcaccagcttcacgaaggttgcttaaattaatcccaacaccaccaccaattttagaaagttggagggcagaattgattgttcgaccaatggtattcatgtcgtccgttgtttgaatcgcaaagcaagaaacaaattctccccggcgtttacgcccaacgttaaggaatgttggagttgcgggttgataacgttgatggatgatttcatcagcgagctgcattgctaactcttcatcaccattagcgaggtaaagagcattcattgcgactcgatcaatatagttttcaaggtagtactctttatcatttgttcgtaaggcatattgagcataaaacttataagctgccataaaagaatggaagtggaagttttgggcttttaaataatcgtaaagcttttcaatgaatgcttcactatatttattcataaattcctcttcaatataatcattttcttttaaccattgaaaacgttcttttaatgaagaaaagcttttggtattcggttctacattatttttgataaagtcttctaaggccaatttatctttatctagttgaatttgtccgttttttgggatatttacttcgttgttataatcgtaatatttaactttggtcatatcgatatcggataacgccatattaataactcactttctgaattaatttgattatgtcaataaagaagccagtacaccaatagcgaattgatgcctggcaaaatattagtttatttaaacttaggcaagttggtttaattgatcaggacgaaagccagaaaaagcttgaccgttaggaagttttacaactggagtcgccataaaaccttcagacttaagttgagatatgtattctggttgttcatcgatgttgtgttcaataaatgaaattttgtgttgctcaaggaaacgttttgtcatcttgcattggatacaattattttttgaaaatacagttaccatcttcacgaggcctcctaaacgattagtcgatgttttctagtataacgatgaattagaaaaaatcaattaaaaaagcactatatttcgtacttgaaaaatagtgaaacacaacatatagtgcttgaactagtggttaacacctgtgaaactttttttgatagaatacttaagcaggtgcttaataaaattaatttgaaaaactaatctattattatacactgaacaacaggggaattttaagtgcttggagaaaaagaatgaaaaaaatcaattcatcattatctgaacaacaaaaatttatgaagatggcaattgcagaagcaaaacaagccagaattttagatgaagtaccaattggtgcgattgttgtccacgagggacaggtaattgggcgtggtcataatatgcgtgaaaagtttcaagatgttacctatcacgcagaaatgcttgcgattatggaagcatgcacgaatttaggaagttggcgtttagaggactgtgacttatatgttacgttagaaccgtgtatcatgtgtagcggtgccattatcaacgcacgaataaaaaatgtttattatggtgctgctgatccgaaagccggggcggttgatagcttataccatttactaaatgattcccgtttaaatcatcaagttaatgtccattctggtattttaggggatgagtgtagtcaaatgttaaaaaactttttccgtaaaattcgtcgccgccggaaagaggctcgacgaaaaaataaggctaacccctagtaatttaaagaaaaatagtgtattatactatttgccgtaaggccttagagcaagggtatgcttacgaaccgtgtcaggtctggaaggaagcagcactaagtatgatataccttgtgctctaagttttattgataattaagctgacccgtaatggtttattgcgggtcttttttatttttaaattttaattaaaatgtattttacctactttatgtgattaattccttgtataatattttatagtattttaaattcagaaagggagtctggcgatgagttatcaggcattatatcgtgtctggcgaccacagcgattcgatgatcttgtcggtcaacagattgttacaagaaccctaaaaaacgccattatcactcaccagataagccatgcatacttgttcgctggtccacgtggtactggtaaaacctcagcagcaaaaatttttgctaaagcggttaattgtcatcattccaaggatggcgaaccttgtaatgagtgtgagatttgtaaagcaattacaaacgggcaattaaatgatgtaattgaaatcgatgcggcttctaataatggggttgaagagattcgtgatattcgggataaggcaaaatatgctcctacccaagcggactacaaagtttatataattgatgaagttcacatgctttcaacaggggcttttaacgcactgctaaaaacgcttgaagaaccaccagccaatgtgatttttattcttgcaactacagaaccgcataaaattcctttaacaattatttcgcgggttcaacgatttgattttcgacgaatttcagcagaagatgcatttaatcgaatgaaatatattcttgatcaaaaggaagttacttatgatgaaaaagcattatgggtaattgcaaatgccgctgaaggaggaatgcgggatgcgttgagtatccttgaccaggttctttctttcagtgataatgaggtaaagttggatgatgctttactagttacaggaagtgttactaaacaattattaaaaaagtactttttggagattagtaagcatgaaggggcgactgctcttgacaccatgaaagatattttggatgaaggaaaagatggtcagcggttcattgaggacttgatttcctttattcgtgatattctgttataccaagaatcaccaagcttgattagtgttgaaagtacgggactaaagcaggaagactttgaagaaatagtccaacttgcttcttcagcgaccttataccaaatgatcgatgaactaaataatattcaagaagagatgcgttttacgacccatccggatgtgtatttggaagttcttacaataaaacttgcacaaatcgaaccacaaaagaatattcaatcggcaccagcggtttcttcggatacaaatactgaagctactaagacgattgaaaaattacaacaagagatacagcaattgcaacaaacagtaaaacagttgcagaatgcgccggcaaaggctagtcgaccatcacctcggcaacaaaatgagcaaccacgagtacaacaaaagaaagtgcaggttaatctcaataagatttacccagtgttagaaaatgcgactcgtcaagatttaataaatgttcgtgagctatggggagatatgttgaatctattgtcggtgccgcaacggtccttacttcacgtttcacaaccggttgccgctagtgccgtgggaataattgttgcttttgattatccgttcttattccaacaagcagctgatgatacaacgttgttagagaatatggaaagtgctctgcaacgtttaactggaaatgaacggcaagttgtttttgtacctaaggataaatggccaaaaattcggcaagactttatcaaggatcatggttttggtaagaatcagcaaaagtcgcaacctattaaacaaaagccgcaaactactgaagaaagcggacaaactcctgcagctacaccagcaccgatggaggaaccaccgctaccaccagaagatgagacactaactgaagaaaagtcacctcaagaagataaccaagtagcaacagcacagaagttatttggtagtgatattgttaaagtagaagataattaagaaaaaggatggatgatattatgatgcgtggaatgaatatgcaacaaatgatgaagcaggctaaggcaatgcaaaagaaaatgatggctgaacatgaagaacttgctaaacaggaatttgttggaaaagcaccggatgatatggtaactgctacgtttagcggggataatcaattaattgacttaaagattaagccagaagcagttgatccagatgatattgatatgcttcaagacttggtaattgctgctgtgaaagacggaatgaaacaagtcaatgatgctactcaacaaaagcttggtaaatatacgcaaggtatggggttgtaaaaagtgatccaatatccagaaccattagcaaaattaattgaaagctatactaagttgccaggaattgggcaaaagactgcaactcgcctggcgttctatactttgagtatgcaagaagatgatgtaacgaactttgctaaatctctcctatctgctaaaagagaccttcataactgtagtatttgtggcaatattactgaagatgatccttgtccgatttgtcgcgataagacccgtgatcattcgcaaattctagttgttgagcagttacaagacgttatggcaatggaacggatgcatgaatatcatggtttataccatgtccttcatggagttatttccccagttgcaggaacaggcccggaagatattaatattacaagtttacttaaacggttaaagaaagataatgaagtaaaggaaattattattgcaactaatgcttcatcagatggtgagttaacggctgggtacctcgctaagctaattaagcctgcgggaattaaggttactcggttggcgcatgggttatcagttggcgcagatattgactatgctgatgagatgacattattcaaagcagttcaagggcgaacggagatgtaagaaaatgttttttaagcggcctactaaagaagtggaacgtgaacggaatcagcgcctgttagaagcggtatattctacgaaggccagttgggatcatgcacgtgaaactgaacgagcagtatatgaagcaaacgttaatagtgaacttcattaccgttcccggattcaagaacaaaaatttttatacctatataaaattgctcgtaagtttaaagttcacgggacgttaaatgatggagtaattgatcgctaggagagagaaatggacggtaaatttatatcatttgagggaccagatggagctggcaagacaagtgtaatccaacagattcaacaacaattggaagatcagcttggcacagaaaaagttatgtatactcgtgaaccgggtggtaataagatttctgagcaaattcgccaggtactctttgatggtcaaaataccgatatggatgggcggacagaagcattgctttttgctgctgctcgtcggcaacacattgtttcagaaataattccggggttgaaagcaggcaaagttattctgtgtgatcgatttgtagatagttccatcgcttatcagggagctggtcgtggccttggtgaaaaagagatttggcaaattaatcagtttgcgattgatgggttaatgccgtcgttgacaatttaccttgatattgaatcggaaattggcttaagacggattgctgagcatcgttctaatcaaattaatcgattagacaaggaaaagcttgctttccatcaaaccgttcgtcaatcttacttgaaactttacaaaaattatccagaacggataaagttaattgatgcaagtcagccactggaaaaagtgattgaggatgtaaaagcaacaattcatgaccgtttttcagatttgttttaataaaaaagggtgattaataatgaaaatgattattgcaattgttcaatcaaaagatagcaatcgtttacgaaaagcatttaataaagctgatattcacgttactcaattatcaacaactggtggtttccttcgtgaaggaaatgcgacatttttaattggaattgaagatgaacgagttcaagaagtattatcagtaattaaaaagaatgctgagtcacgtgaacaatacgttacatcgcaaatgcatatggatgttgaaggaggttcagcatttcctgtcaacgtaaagattggtggggcaactgtttttgtcttaccagtagaagacttcattaaattttaagtaggtgaagatggttggctgaacagggacaaacacgtgcagaaaaattacaaccagcaataattactcgttttcaaaaaatattattaaataaagaacttgctcatgcctatctgtttgttgggccaggcggttcaggaaagatgtcaattgctcaatggttatcgttacggttattttgtcttcatccccaagacaataaaccagacttaacttgtgccgagtgtcagcgaatcctgtctgggaaccatcctgatattgtctatgctgctccagaaggtcgccaaataaaggttgatgagattcgtcacttaaaagcagaattttctaagagtgcggtagaaggcaataagaaaatttttattattaaagatgctgataaaatgacaaatggtgcagcaaatagtcttcttaagtttattgaagaaccggggactggcgtttatatttttatgctaacgactaataaaagtgctgtcttaccaacaatccgatcacgaacacaggtgattgaactgccaccattaaaacgagatgcgttgttaacagttttaactgaacataatattccatcatctcagcaacagattgctgttgggattacagattccgtcgcaatgattgaacagtggcaagaagataattggtttgagagtgcgatcaaaggagtcattcagtggtatcaagatacgacacgaaatgggatgttaggcttcgttgatgttcagacaattctacaaaaagtagctaccgaccgggataaacaacaagtgattttggacctaattaccttaatctggcgtgatacgctaatggtaaattccggaattacagttgccaaccgccttcactttaataatattttaggagaaatgggagaagtagttagaaaatactctcctcaacaattgttagcggctagtcagttaactttggaaactcgtcacatgttagaacaaaatattagctttcaaaatattgttgaacaattgacgattcggcttgtgcaggttttaagcattagttaggagcgaaaagatgagtgaagaatatagttcagataatctttatgaacaatttgcgcaggtgatgaaccagacccaggatttagttaataaaatggagcagttgcaggcaaaaattattgctatttctgaggaaaatgttgaactttcaattgaaaataagcatttgcgtcagatgattaaagaaaagcaatcacatcatagtgaaaaccaattatctggatcacggcaaaatttaaaagagctttaccaacagggttttcatgtttgcagtgagtattatggtaaacgtcttgagcctaatgaatcttgtactttttgtttagatgcaatattcggacatgaacaaggaatgacaaaataggagatagtatgcagcaaattagtagttttaatgatcaccaatcaggaagtttatacttagttccaaccccaattggaaatttagatgatatgacttttcgtgcaattaaaaccttaaaagaagtggatctgattgctgctgaagatacgcgtcatactcagcaactattaaaccattttgatatattaacccgtcaaattagctttcatgagcataatgctgaacaacgtgttccggaattgattgagaaattaaaagctggttattcgattgctcaatgcagtgatgcagggatgccttcgatttctgaccccggcaaggaattggtagcggcggcagttagagaagggttgccagtaatcccgcttccaggagctaatgcaggattgacggctcttatcgcttcggggttagttccccagccattttacttctttggctttttagggcgtaagcatcagcaacaggtagcggcgttggagcaattaaaagagcgtgaagaaacgatgatcttttatgaagctccacaccgcttaaaaaagactttagctacgatggcggaagttttcggtaatgaacggcgagttgttttagcacgggaactcactaaacgctatgaagagtttacgcggggaacgcttgctgaaacaactgcctggtttgaagatcatcaaccacgaggagaattcgttattctagtagctgggaatgaacacccgacagaggagacagataatgatattgaattaccattaacagaacaggttgataaggaaatcttaaatggtctttccactaatgctgcgattaagctggtggcaaagaaaaataatataaaacgccaggaattatataaacaatatcatcaattgtaggagaaaaatatggagttaaagcaagaagcacaaacatttgaaatgccgcacttactaacatattatgagtgtgatgaaacaagtcatccaagcctaagcatgatattaagtatgatttccatggtatccgatgagcatagtatgtctttaggaatgggaaccgaagaaatacaatctactggcggtacatgggtagtaagcggctatgaaggatatctttccgcaaatcaaccttcttttggcgaaacagttattttaggaaccaaagctgtttcctataaccgcttttttgctgttcgtgatttttggataacggataaagaacaccagattgaatatgcacgaattaggtcaatttttgtgtttatgaatctaaagacacggcgaatgcaatcaattccactaggtttaattgaaccatttaatgctcctgttgcgaaaagaattcctcgtctaaagcgacctcaaaaattggatgaaaatggttcgataataaagaaaaattatcaagttcgttattttgaccttgatgctaatcaccatgttaataatgcgcgttactttgattggcttcttgatcctcttggccgtgattttttacgagagaatcagataaaaagatttaatttgcagtatcttcaagaggtacgcaatggggaaattgtggaaagcaaagttaataagctccaaataaatgatggaacggtaacttaccaccagattggcgttgataagcaagttgatgcaattgctgagatagaatggtattaaaaattaatcaatgaataatagcgactggtttctaggcaggaaattagttgctattttattttagtcctaaatattagacgaaaagatcttaaatggtttaatgtagagacatttaaaggaagatggtattctatgaatagtagtaattatgaggagtgagttgacgtgaaaagatctttaacggcgattatttacctcgaacccgatcaggttaatttacggatcattgagatacctactttaaaagtgataaataatgttcgatcgggccttctaaatatcggaaacgctaaagttgctaattattcggaaaatatgactgcaattgttaataatattgaaggatttaagcagattattaatgactaccaggcaacaccagttaaattttatggcgatttagaagaccttgacccagttgcaactaggtatgtggccgaccagttagaagttcggacaggattacagattgaatggttaaacaataaccagctaatggcacagtcgatgagttaccttttaaccttgctaccagattttgaaaaacttagtaaacacaatatgtatcttctaagtatcggtcttagctcgactaccttagcttattttcaccatggaagctttgaacgggcatgggatattgatcttggtaatgcaaaaatcagtcagttggtggggcgtctccgaaaaactgctaccaatccaactgaaattatccaagattatatcagtagtaaattagaatacttaacaccagaactgacaaagaaaaagcatacagtaatgatggtgcaaaatgccctctcactcaataaattatttttgccaaatgatcagcaaatcgcggaagttcccctaaataaatttcatgatgattaccaaaagattttatcgccagtaaaagatggcttaatgaaaaatattcagattgatgaccaacaatttgaattattattaccaaattatttagtaacggcgcgaacagtgcgcttaattcaaccagcaggcctttacgtaactgatatttcaacgatggatgggatttcccatggaattggggttgataatcctaaaacgagacggcaaattaatgaaatgatcagaacagctgccgacaatatttcttcacgatacggtgttgattcagctcatcgggattttgtaacgcgcttttcactccaactctttgatcaattgcgcccaattcatcgtcttggtcagcatgagcgattattattagaaattgctagtagaattgatgacattggtaattttattaatcaacggggacactaccgccactctgcttatattatggaggctaatcctctaattgggctttcagataaagataatcggattattgctgaagtggcgagatatcatagtgcagagtctccagatattagtcaagctcattaccgccatctcgatgatgagatccagatgccagtagcaaaattagctgctattttacgattggtggatgcattagatgattcgcggctgcaaaaaatttcaagtattagattgaagctggtaggagatagccgcttaatcattaaagcaatagccaatgatgaccttgttcttgaaaagtggtcttttagtaaaaaatcacaactatttaaggatgtatacggaattgaaccggtcttaactgagaggagcgatcattaagatgtataaggagttttataagccgcagaattatgttaatcgagaattgagttggattgactttaatggccgagtactgggagaggcaactgatactgctaatcctttgttagaacgtgctaacttcttgggaattactcaaagcaatgttgatgaattttttatggtgcgggttgcatcgcttcataagcttgctgctgccaatgttactactactgatgcgtctggtctgactccagaagagcagttggatgcagtaaatgaaaaagaacaccggatggttaagcaacggtatgaagtttataatcagcaaatcatcccgaaccttgctaaaaataatattcatattctccatgtccccaaacttgacgagaagcaatatgaatttattcgtcggtactttaatgatgagctgatgccagttttgactcccatggcagatgatgcctcacgtccttttccttttatctccaataattctttaaatattgctgttcagctacggcgtcaaatccgttcaacaagtgaaccagttgcagaggaaattctagagggagatcaagaagttcatcgtccacaaatggaaccacatgatgatcgtcaagaagcagatatcaaatttgcaacagtccgtgttccagaaatttataagcggttagttcggttaccagaagaaaatagcttcattttgattgatgaaatcattactgaatttctgagcgcgctttttccaggatacgagatcttagctacagcgtcatatcgagttatgcgggatatggacttagatgtggctgaagaagatacgtctgatttgctccgggcagtcaaacggcaattgcgggaacgagagcatggacaggtgatgcgcctagaagttcctgcttctatcgatgaatggttaaaagatcaattaattgataatctgcatgtaagtgaacggtcactgtatgaagtagatggtcccgtcgatttaactttcttaaaaaaattatcggggatggttgatggtcatgatgacttgcgctatccaccatataagccatacctcaacccagcgttagatatggatcataatattttttcttcaattcgccaaaaggattacctaatgcagcatccttatgataattttcaagccgtggtcaactttattcatcaagcagccattgatccagatgttttggcaatcaagatgactctttatcgggtctctggtaattcaccgattattaagtatctcggaatggccgcgcaacagggtaagcaagtaacggttttagttgaagttaaagcgcggtttgatgaacaaaataacgttcggtgggcacaacggcttgaacagatggggtgccacgttatttacggtttagttggccttaaaacgcactgtaaagttgctttggttatccgtcgcgatgaagatgggctgcggcgttatatgcacctaggaactgggaactataatgatgtaacagctcatttttacactgatatgggattatttacttgtgaccatgagctgggcatcgatatgacaaacctgtttaatatgctgtcaggatttgcacgaccagcttatttcaatgaattacgggtatctcctgatgggattcggacatttattaatgccaaaattgatgagcaaattgaaaatgccaaaaatggtaatcctacgttaattcggatgaagatgaattccttgtctgacaagcaaatcattgcccgcctatacgctgctgctgctagtggagttaaggttgagttattaattcgaggcattacctgtttaaggaacgatttgccagaattgcatgggaatattgaggttcattcgattattgggcgtttccttgaacactcccggatctactactttaagagtaatggtcatgaggaagtctacctcgcaagtgccgatatgatgacgagaaatcttaatcgacgagttgaagaattgtatcccgttacccagccagacacaaaagctcatgcaattcatatttttgacgttatgtggaaagataatgtcaaggctcgacggttagtaggagatcattacgaacggattgatcgtggtgatgtcgcaccattcagttcacaagaatactttgttaaacaagcaatgaaattgaatgcgcgtgagaaaaaggagaagaaagcaaaaaaacatttttcttctgtttttgaaactttaactcgccatgttcccaatcttcatttagatgagcgaaaggatgagtaatttatgagcaatgagcagtaccttgcaattcttgatttaggttcaaattcagttcggcttaaaataacaaaaattcaagataacgggagctttgaaacggttcaatatgaaaaaagatatgttcgcctcgcttctaatatggggccagaaaaaatgttgaagtcagctcctgtaaagcggactattgatgccctaaaagaatttcgaacaatttgtgatcgataccgtaataagaaattgacaattattgcggtggcgactgctgcggttcgtcaagcacaaaatcaactgcaatttcttgaaaaggtcaagcaagaaacgggctttgaaattcatgtaattagtggagaacgagaagcatatcttgactatgttggtgttaatcagactcttccaattgataagggaataattgttgatactggaggagcaagtatggaattaatctcggtgaataatggggaagcagaagaagcgattagtattccgatcggttcagttagcatttcgcaaacctaccatcttgaagatcaaattaatccagctgatttatttgatgccatgattaaaattgatgaagttctttctcaacaattatggctaaatcggatgcgggagacaaaaattgtggcactcgggggatgtaaccgtgcattagcaaaggtatatcggtggcaacaagctcttaatcctaatgaagccagaccagttcatgggctaacaatgcgttcagaagaagcctttttgattatgcggcagctattagaaacggatcgccagacgcgggcaggaatccgtggaattacgaaagtgcgagcggatgtaattgttggaggacttctcccccttatctctcttgtccggcaattgtcaattaatgagatttgctttagtaatagtggattaagagaaggtttattatttaagtaccttgagcagcaaattaattttgatcaattaaaatcctcgctataaaattatccactaaaatttttgcttatttttactaaattttactaattagaaacagtaaaattgtgctacaatcactatgaaagctttagttggagcaaggaggaaacaagatgtcaattttagttgctggtggtgccggatatatcggttcccatatggtaaaagatcttattgaaaatggtgaagatgtagtagtggctgataacttatcgacgggtcaccgggatgcgattaatcccaaggctaagttttatgagggtgacattcgtgatcgtcaattcttagataagatttttgacaatgaagatattactgcagttgttcactttgctgctttctcaattgtacctgaatcaatgagtaagccattgaagtactttgataacaatactggcggaatgattactttgcttgaagcaatgcatgatcatgatattaagtatattgtcttcagttcaaccgctgctacttatggggttccagaacacatgccaattaaggaaacggacccacaaaacccaattaacccatatggcttgagtaagttaatgatggaagaaatgatggcttgggctgataaagcttacggtattaagtttgttgcccttcgttactttaatgttgccggggctgccactgatggtacgatcggtgaagatcacggtccagaaacgcacttagttccaatcattcttcaagttgcgcaaggcaagcgtgatgaattgagtatctttggggatgactacaacacaccagatggtaccaatgttcgtgactatgtccatgttatggatttagcagatgctcatattcttgctattaagtaccttaaggaaggtaacaagagtaatgcctttaaccttggttcatccactggcttctctaacaagcaaatgctagaagcagctcgagaagttactggtaaacctattccagctaaaatggcaccacgccgtccaggagatccagattcattagttgctgctagtgataaggctcgtaatgttcttggatggagtcctaagtatgatgatgttcacgacattattgcaactgcttggaagtggcattcaactcatccaaagggttatgatgatcgcgactaataatcggctttaaaataacaaacaggctctcagtaaaacttttgctggggcctgttttgtcgtaaataaacaaaagaaattaaaagagaagtcaaagcggatccagtgtgataagatgtaagatgattgaaaggattgataaaagatgaagattctagccgtcgatacatccaaccacccaatgagcgtagcgttggttgaagatgagcaattgttggcaacgacaacccttaatatggttcgcaatcatagtatttatttaatgccggcaattagtaagttatttaagttagttcagtggcagccaacagatattgatcgggtagtggttgcacagggaccaggatcttatacaggagtacgaattgcagttacaaccgctaaagtattggctgatacagaaaagattgacttaattggcgtatcaagtttagcagtattagcacgtaatgtagttccaacatcatcagcaattattgttcctttctttgatgcacgacgaggaaatgtatttgctggtgcttaccagtgggaaaatggcgagttagtaaataaaatagaagatcaacatctagggattgatgttttgcttaatcaacttgcaaaattagatcaacaagttgttttggtaggtcatatgactgataaaattcaagccaaatatgatcaattaccagctaatgtgacccttttgccacgatcttatagtattccgtcaacttatcaattagctcttgcaggtaaaatgaaggaaccagttaaagagattgacccttttgttccgcattatttacgaattactgaagcagaggctaattggcaaaaacttcatcctggagaaaaaagaaaaaattatgttcgagaagtttaaagaatggtttatcaatacgaccaatcctactaaacgaccgatccttgaatttacacgacgaatagtaatgatatctggtcatcaatacatggtccggatggcaaaggaacaagatattcaaaccttggtagaaattgaagaaagaatctatggaaaagcaccatggagttatgctgctttccgcattgaactccaacggccgtgtgatcgactatatttagttgttgaggatgaccagcagattgttggctttatgggaacagccattgattggtaccattatgatttgcatattacgaatattggcattacaccaagttaccaaaataaaggaattggaacgtatcttatttcaactgccaaaaactatgcccggcacttaaaattacattcgctgagtttagaagtacgagtgtataacgtatcagctcgtcgcttatatgaaagtttaggctttcgtaatcagcatattaaaccacgttattacttagataatcacgaagatgccgtggatatgcaagcaaacttacttaggtagaggtgaaagtattttattatgacagaacgcacattaaccttagcgtttgaatcaagctgtgatgaaacaagtgttgccgtaattgaaaatggaactaaaatcctttccaatattgttgcaacgcaaatcgatagccatcaacgttttggtggagtagtaccagaagtagctagtcgacatcatattgaacaaattaccaagtgtacaaatgaagctttagagcaagcggctgtaggctatgatgacctagatgctgttgcagtaacatacggtccaggattagtcgggtcattattaattggtgtgacagcagcaaaggccatcgcatgggctcataaccttccgttaattccggttaaccacatggcaggtcatatctatgctgcacgctatgttggggaattcaaatatccacaaatggcattgttagtttccggtggacatacggaattagtttatatgccatctgaacatgaataccaaattatcggtgaaacacgtgatgatgctgccggtgaagcttatgataaaattggtcgcgtgttgggagtcaattacccggcaggaaaaacgattgatgaatgggcggctaagggtaaggacacttttaatttcccacgagcaatggaaaaagaagataattatgactttagctttagtgggctgaagagcgccttcatcaatacagttcataatgcagaccaacgtggagaaaaattagataaatatgatcttgcagccagtttccaacaaagtgtcattgacgtgcttgccgaaaaaacaatgcgggcgttagatgattacccagtaaagcaactgattttagctggtggggtcgctgcaaatcatggtctccgtgctcgtttagatcatgacatgaagaaatctcatcctgatgtaccgatgctgcaagcaccgttgaaattatgtggtgataatgctgcaatgattggggctgctggttatgttaactacaagcatggcgaccgtgcaggattagatttgaatgcagtaccgggattaatgttcgatcgaattcagaataaataattataaacataactctcataagcaatgatggcctccagtgttcggtaaaaccggacgctggaggccattattgtactgcgctgtatggatgtaaccgcggtctttttttgcgtttatgattcaccatttgctttgtcaacggcatccatcatggcgtaacggaaaccatttttctccaatgcttccacgcctttgattgttgtacctgctggtgatgttacttgatcacgtaataatgctggagcaagcttgctatcataggctagtgtccccgtaccttttaccatactagcaataacttcatatgcagtttgacgatcgaggccatgcttgacggcggcatcgctcattgcgtccatcatcacatcaacaaatgcagggccacagccgccgataacaccaattatatctagttgtcgttctggaactttgatgacatcaccaagactatctaaaacagtcattacttttgaaattgcttcagcagaaattccggttggcaaggcaagaccaattgtgccggcattaacttcaactggtgtgttgggaataatattaacaatttctttattcggaagcactttggctaagtcttcgtgagtaattccagcagcggcagagataaaaatagtgtgatcgttaaggacggctaattctttagcgactacggttgtaataggggccggggtagtcaaaattacgatatcgggtgtaaggttaactacttcactgtttgtattaacgagtttaaacccgagcttcttagcaaggcttgtaacacgtgaattaacagggttcatcgcactgagggtaaaattttgcgtacgacttaatcccttcataattgcgcttcccatatttccgacaccaataattgtaattttcatctaaaaaacctcctaaattatttccgaacttgcccattaccggtaatttcatatttgattgttgttaattgttgtaatcccattggtccccgggcgtggagtttttgggtactgataccaatttcagcgccaaagccaaattctcccccatcagtaaaccgcgtagaggcattaacataaacacaggcagaattaatggcttgttggaagtagcgtccccgggtaatgttgtttgtaataattgattctgaatggtgagtactatggtgattaatatggttaattgcatcatcaagggaatcaacaatttttacggccataattaaatcattatattctgtctcccaatcttcctcagtaacgggacggatagttgatactaattggcacgccatttcatcaccgcgtaattggacgccatgttccattaaagctttggcaataacaggaagaaattcagcggcaatatcgcggtggataagtaatttttcagcggcattgcatacagaaggccgttgtacttttgcatttacagtaatattggtcgccattgttaggtcagcatccttatcaatataaatgtggcaattacccgcaccagtttcgataactggaaccgtagctgttgttacaacccgctgaataagggcctggccgcctcgtggaatcaagacatcaatgtagtcagtgagattcatcatttcatcagcaatcgcatgactagtgtcggtaataagctgaaccgcatcgaccggtaaatgttgactttgtaatgattcacgaagaatttttactaaggcagtattagtctggatagcttcttttccgccccgtagaataactgcattgccactcttgaatgtgaggccggtcgcgtctacagctacgtttggtcgtgcttcaaagataatgccaattacccctaatggtacgcgccgttgaaggatttgcaacccatctttggtaatccatcccttatcgatttgggaagtgggatcgttcaagtcggcgattgttcggagaccattagccatgtctgcgatacgttgggaattgaccattaaacgatctgtaaatttagttggcatctgggtagcggcgaccaagtcttgttggttggcagcgataatttggtttttatttttgattaaatcatctgccaattgaagcaatgccttatttttggtggcagtgttcattaaagctagtttgtttgcagcgatttgggctctttttccaattgtaattaaatcttggttcattatcatcactcctattttccaaaatgagtaccaatagtatgaccatcaaaaatatcaaaaagaattttagggtcacgaccattgcataaaatcatttgtttacctgcttgcatcattgtggcagctgcccgtaatttagttaccattcctcctgttccaaacctagtgctgctaccgcttgcgacgttctctatttccgtcgttaggaatggaacttctttaatgatttgtgcgtcaggaaatttatgcggatctttgtcataaagggcatcgatatccgaaagaatgattaactcgtcagcgtcaatggcaatagctacctgggaagagagttcatcattgtcactgaaagtagtgtaatgatcaagctcatcaactgacacggggtcattttcgttaacgattggaatcacattttgctgaagtaaagcattaattgtattaagcgtatgctggcgactgacgggataagtgagcacatcacgggtaaggagaagttgggcgacgtgcgtttgatagtctaaaaatcgttgcgaatagattcgcattaaagcagcctgaccgatagatgctaaggcttgctgttgtgctatttcggcgggacgatctgttaatcccaaacttgcaagaccaacgccaattgctcccgaggaaacaagaataagttggtatccttgattgtttaatgtcgcaaggacaaatgaaagttggtcgattgttcgtaaattaatttttccattaggaagaacaaggctactcgtaccaatcttaacaactactttttgtattttatgagtcatagaaaatcctttcagaaaacaaaaagcgcccttaaccgagacaccaattatggcggtaccattctcgtttaaagacgcactttacacttttaaattattttattattagaatatattaaagttgtagcagggcttcggtactggcgatagcttgcagtcgatggctatcgttcctggactgacctacttttatctacaattaaaattttaattggaagactaagcttttgtcaagactaattatttttgagattcaattaaaaatgaattgacaaataattaaaaataaattagaatacgagcaacaattaaatattagtcgtttaagaagagtaaaagcaatgtagtattaagagagttttcgggtggtggaagaaaattacaaattgctttgaagatggtcttaaaaaatacaacaagtgtgaggaaaaaactaagcacttgtcggctgatatccgttatcaagtatcgaagtttattatgaacttcctgaggctattcatgtgagtggatagtaaattaaggtggcaccacgaaaatactcgtccttatttaagttaaggacgggtattttttatggaggtgaaagtgatgaaacgcaaaattgcattagctcaacttgatattcaattaggaaatcctgccgaaaattatcaaaaagctaaacaagcgattgaagaagctgctagtcaccatgcagatatcgttgtcttgccggagatgtggaatgctggctatgccttagatcaattagcagaattggcagatgaaaacggtcaaaagacacaaaaatttcttagtgagttagcgttagaaaatcaaattaacattgtcggtggttcagtagcggtgagatgtggacaatcttttttcaatacaacctatgtttatgatcaaaagggaaatctaattagcagttacgagaaggtgcatttatttggactaatgaatgaagaccgatatctaaaagccgggcaaaaagaaaatcactttgaattagctggggttccgagtgcaagttttatttgttatgatttgcgattccctgaatggattagaacagtcactcgttatggaactgatatcttatatttttcggcagaatggccaagcaaacggattaaacaatggaaaataatgcttcagtcacgggcaattgaaaatcaagcctttgtagtcgcggtcaatcgtgttgggacggatttagagaatagctttaatggtcattcgttagtaatagatccgcttgggcagattatccatgatgcaggagaagttgaacaagtaagttatgcagaaattgacttagcgcagttagcacaggttcggggccgattccggtgtttaaggatcgccgaccaagtctttatcattaaggggatggaaaagatgaattttgcacaatcaaaattattagacactttaccgaaacaattttttgccaatttagttgccaaggttaataaaaaaataagtgaaggggtcgatgttattaatcttggtcaagggaatcccgataagccaacgccagattatattgttaagagcacgcaaaaatgggtagcggatccgcaaactcataagtattcactatttcggggattgccagcatttaaagaagcagcggcaaaattttattctgaaaaatatggagctgactttgacccagaaaaagaagttgcaattttgggtggttccaagattgggcttgtagaattgccatgggcattgatgaatcccggcgacacttttctgcttcctgatcctggctatccagattacttatcaggagcagcattaggagaagttaattttgaaacagtaccattattagcagaaaataatttcttgccagacttagaggcaattcctgaagaggtggcgcaacgtgctaaattcttctatcttaactatcctaataatccaacgggtgctgtagctactcccgagttttatcgaaaattagttgcgtgggccaaaaagtaccatgtgggcattattagtgactttgcctatggcgcaattggctttgacggtcaagctccagttagctttatggaaacaccaggcgctaaagatgtggggattgaattttataccttttctaagacgttcaacatggcagggtggcgaatcgcatttgcggttggtaatgcagatattattgaagccttaaacttaattcaagatcacctattcgttagtctttttcctgccttacaggaagctgctattgatgctttaacgctgccacaacgtgatgatgcaattgccgaaattgtaggtcgttatgaagaaagacggaatgcttttattaatgcggccgaaaaaattggctggcatgcatttactcccagggtactttctatgcttggatgccggttccaaaggattataccagtgaaagctttgcagatttgttattggacaaagctggcgtggcagtagcaccaggcaatggctttggcaagcacggtgaaggttatgtgcggattggccttttgattgagccagcacgactgacggaggccgttgagcggattgctaaattgaatttatttagttaaggaggaaaaattatggctttgaaatatacggttttaggtgcaggggcaatgggactacgatttgggtattgcttcaagaattagcaggtgcgaaggttgattttgttgataactgggcttcccaagttgaaactattaaacaacagggtggggtttacgtttctcgagaccatgagaatcgacatcttgtaccaattaatatttactcaccagaagaatatgatggtgatccagatgtgtttatcgtttttgccaaacagatgacgcttagtgatttgttacaacgcagtgctcatttcttccgtcctgaccatcaatatgtcttttccgggatgaatggcatgggacatattgaaaaaattaaccaatattttcctaaagaacatgtcgtggccggaacttgtttaattggcacggtccttaataaggcggggaatgtggattttattggtaaacctggtgctggttcgatcaacttagctccccaagtcggcgaaccagatgagcgggtaaaacaaattgttgaggactttaccacggcgaatattaatccccaccttaatgataatttttatggtaccctcctaacaaaagtagtttttaattctgttattaacacgatctgcacgctttttgagattcaaatggggcaatttatcgattacgatggtgcagaaaagcttggcaaacagttaattaatgaagcattcgatgttgccgaacgggctggtattcagctcttaagcactcgtgaggaggagtggcaaacgattaaatatgttagtgaagttaccagcccgcttcattatccatcaatgtaccaagatatgagtaaaaatcgaccaacagaagtagattacattaatggatatatttatgatttaggtaagaagtataactatgaggcatctactcacgacttcttgcgtaatttagttcaccttgcagaaaatactcgtaaattccgacaaaactaaaagaagaagcggacctgtccgcttcttcttttagttttcttgatcaaattcttccagtttttctgctgcttctgtccatgcaagttcaaattcttcagatttagctgataattcatcaagttctttttgaagatcggttaattttccaatatccgtagcgatctctggttgactcatttgttcttggattgcggtttgtttttcttctaattccgccatctgttgttctagctcatcgacttgtcgctgaatttttcggcgagcgcgctgctgttctttgctttgctgataagattgtttaccagctggtgctttagtaatggtggtggaattatgtgaagcagcttcagatgaactttctttttccttagcaattaggtagtcatcataattgccttcgtaatgtttaattccgtcgtgttccattgctaagatatcggttgcaacctgattaataaagtaacggtcgtgagaaataaagagaacggttccgctaaattcgttaattgcgttttcaagcacttctcgactatcgatatctaagtggttagtcggttcatcaaggataagaaaattaatcggtttaaatgagagcttagttaactccaatcgtgctttttcaccaccagataggtcatgaacaactttataaacatcatcaccaacgaataagaaactacctaataatgagcgaatatctttttcaggtacttctggatggtcatcccatacttcttctaaaactgttttatttggatgtaattgttgctgttcctggtcatagtaaccgatatcgaggttagcaccgagtttgattgttccactaattaacggaattttatggagaatagatttaagtaaagttgattttccgattccatttggtccgataatcccaacacgctgcggcttgcggacattaaatgaaagcggcccagcaaggatctgttcatcgtagccaacttttgcctgctccacatcaagaacttcatttccgctatctttttcagaatggaattgaaaatggattgatttatcatcagtttctggacgctcaagccgctccattttttctaattgctttcgccgcgcctgagcacgtttagttgttgaggcacgaacaatatttcggttaacaaagtcttctaacttagcaatctttttttgttgttggtcatagtgtttccactctgcttctaatcgttcttgcttgtgtttaacaaattgcgtgtagttaccagtatagtgggtgagtgttttattatcgagatcataaacatcgttgacaacacgatctaagaagtaacggtcgtgagagacgataagcaatgcaccttgataacttttaagataatcttctaaccatgaaagaacgttcatgtcgaggtggttagtcggttcatctagaatcaaaagccccggtgcttgcagaaggatctttgctaaggcgagtttagttttttgccctcctgaaagggaattaattggcgtatcataactatcttcgccaaaaccaaatccatgtagaattccccgcatacgtgattcgtattcgaaaccaccctgtttcttaaaggcagcttgtaaattatcgtatgttgaaagaatttgttgataattgctatcggaactatcaaggtcagcgaactgttgttcaagatcgtggatttgcgtttccattttgtggagaggagcaaagacagtatctagttcagtccaaatgctattttgactatcgagtccttgatcctgggccaagtaaccaattgtcaaatctttaaccttcgtaattgttccttcatctggttcggtgattccagcgatcatttttaacaaggtcgttttaccagcaccattacgcccaacaagcgcagtacggccatgctcttggatttgcatgttcatattgtgaaataaaacgtccgcgccaaatcgacgcacaacgtcatttgtctgtaaaagtaacatattgaaacctcatttaattcgttgatttaatatggttttattttagcagatttttaattttaaataaaaatttgaaaatatttttgtattttagttcacaaaaaagggtttaattgctagaatatactcagacttaaatttcacaaagtaaaaattagtaacattatccttgtcaaaaacttagtaattagttggcaaactaggttgagaagggcttgttttaggaggaacaaaagtagaatggctaataaaaagattccacgcgcgactgcgaaacggttaccaatatatttccgttatttaaatgtattgaaagacgcaaataagcaacgggtatcatcaactgaactttcggaggctgtgcaagttgattcggcaacgattcgtcgtgacttttcatattttggtgaattaggtaagcggggatacggttatgacgttgaaagtctattaaagttttttaaaggaatcttacaccaagactcattagttagtgttgccttagttggagttggtagtttgggaagtgccttgttaaactttaatttccaccaagataccaatttacggatcagtgcggcatttgatactaagccagaatatgccaatacagtcaaaagcggtattccaatttacccatccgaggatatggtaaagcagttaaaagagcaacagattgatgttgttattctaaccgttccaggaatcaaggcccaacatgttgcggaccaattagttgaagctggtgtgaagggaattcttaactttactcctgttcgtttatctgtgccaaaaaatgttcaagttcaaaacattgacttaacaaacgaacttcaaacattaatttacttcattaaaaattatactgaagattcaattgaataaattaggagagcattggtttgatgaaagcgtccaaccaatgctttttgtttactaaattattaataaaagtcatggattgtaggtatgatctcttaagttttaaaaaatggtcaaaaaaagtcaaagtatttttgttgcattttaaagagaacatgttatatttaaacatgtggttagcactcgaagagtttgagtgctaaaaataaaatttattaacaagatggagggattaacgtgttaaaaccattaggagatcgcgttgttctaaaagctgaaactgaagaagaaaagacagttggtggaattgtccttgcttccaatgtgaaggaaaagccaactactggaaaggttattgccgttggagaaggtcgtactttagaaaacggacaaaagcttgctccagctgttaaggaaggcgaccgcgtattatttgataagtacgcaggcaacgaagtagaatacaacggtgaaaagttcttagttgttcatgctaaagacttagtagcaatcgttgaatagttaaataagcgaattaagagcaggagacagaaagaatgaaattccttcaccgtctcttttaaataatgaatttaattttgaggtgacataaatggcaaaagaaattaagttttctgaagatgcacggagcgctatgctcagtggtgttgataaattagctgatactgttaagacaacaatgggtccaaagggacggaatgttgttttggaacaaagctacggcacaccaactattactaatgatggtgtaactattgctaagagtattgaacttgaaaaccaatttgaaaatatgggtgcaaagttagtagccgaggttgcttcaaagactaacgatattgccggtgatggtactacaactgctactgttttaacccaagcaattgttaatgctggtatgaagaacgttacctctggtgcaaacccagttggtattcgtcgtggtattgacaaggctaccgaagttgctgttgaagctttgaagaagatgtcacacgatgtaaagaccaaggatgatatcgaacaaattgcttctatttcagctgctaatccagaagttggtaagctaattgctgatgcaatggaaaaggttggccatgatggtgtaattactatcgaagattctcgtggtgttgacactagcgttgatgttgttgaaggaatgagctttgaccgtggttacatgtcacaatacatggtaactgataacgacaagatggaagcggaccttgacaatccatatattttgattactgacaagaagattagtaatatccaagacattttgccattgcttcaatcagttgttcaagaaggccgtgctctcttgatcattgctgatgatattactggtgaagcattaccaactcttgtattgaacaagattcgtggtacctttaatgttgttgctgttaaggctcctggctttggtgaccgtcgtaaggctcaacttcaagatattgctgttttgactggcggtactgttatttctgacgaccttgggatgagtcttaaggacgctactgttgatcaattaggtcaagcaaacaaggttacagttacaaaggatactactactatcgttgatggtgctggttcaaaggaagctatccaagaacgtgttgaccaaattaagcaagaaattgctaagtcaacttccgactttgacaaggaaaagcttcaagaacgtcttgcaaagctttcgggtggggttgccgttgttaaggttggtgccgcaactgaaactgaattgaaggaaaagaagtaccggattgaagatgccttgaacgctactcgtgctgctgttcaagaaggatttgttcctggtggtggaactgctttaattaacgtaattcctgctcttgacaagattgaagccgatggtgatgaattaactggtatcaatattgttaaggctgcccttgaagcaccagttcgtcaaattgctgaaaacgctggtgttgaaggctctgttattgttaatgaattaaagaacgaaaaagaaggtattggttacaacgctgcagatggcaagtttgaagatatgatcaaggctggtattgttgacccaacaatggttacccgttctgctcttcaaaacgctgcttccgtatcagcattgcttcttactactgaagcggttgttgctgataagccagatccaaatgctaataaccaagctcctgctgctccacaaggcggcatgggcggtatgatgtaataccatttgactaaaatttaattttgtgggcagaaaagattctaatgtttgttttttcaaatgttgggatctttttttattggaggaaaatcaatgacgaaaaatgcaaccagtgtctataactatttagacaacgaaaaaataaactatcaaattgttactcatcccccagtctatacagcggaacaagcagacaagtatgttcaagaatatcaatttgcccgtacgaaaaccctttttctaaaaaataaagctggctattatttagttacaatcttagaaaataagcgtctcaatatgaaaaaattgaaagagaatctatcgactagtcggttttcatttgcccacccagaagaattagctatgaagttaggaataacaagtggggctgtttcaccctttaacttgtttaatgataaacaacatcaggttacctttattattgatgctgatatctttaagaacgaggagttaatagggtgtcacccaaatattaatacggccacagtgattttgagaacaaaagatttgcttcaaataataaagttgaatggtaattcagttaaggcggttcaactataaagttaatctaaaaatcttaaattgtggtaaagtaaattagtattaatttttaaccaaactataactgaaaggaactaagaaatggaaaaaatgaaattccagaagataacgctattttctggtgtaatgcttgccttaaattccttaattggttcagggtggttgtttggtgccggaactgctgcaaaggttgccggaccagctgctattttgtcatggatcttaggagcaataatcattattagcattgcccttacttatgttgaattaggggcaatgtttccagaaagcgggggaatgagtcgttatgctcagtatagccacggtccgtttttaggctttattgctgcatgggcaaattggatttcattaatcactttagtcccaatggaagcagtggcctcggttcaatatatgagctcgtggccgtgggcatgggcaaattggactcaccactttatgaaaaacggtaatattacgactcctggattgttagttgtatttggctttatgctggtttttactttgatcaatttctggtcggtaaaattgatgactcgctttactaacttaatatcaatttttaagattttattaccgacactaacaattgtgatgcttattgcggcgggttttcatcctagtaattttggtcatagcgtaactacttttataccatatggtagccggtcaatctttgaagcagctgctatttctggaattattatgtcttatgatgcctttcaaacggtaatcaacatgggaggagaaatgattaatcctcataaaaatatcgtgcgaggcgtattgatttcaatgattattaccgctgtgatctatgtcatgttacaagttgcctttattggagcgattgatccgaatttattagcgcaaaaaggatggcatgggattaactatacgtctccatttgctgatattgcgatcctgctggggatgaattggcttgcaattttgctatatatggatgcttttgtttcaccatttgggacaggggttgcgttcgtggcgactgcctcacgagcattggcagcaatgactcatactggacatttgcctcaatggttgggacggctagaacggcgctacatgattccgcggcttgcaatggttgtggatctaattttagcggtggtaatggttagtctcttcagaaattggagtttgttagccactgtaattaccggttcaaccttaattgcttatcttaccgggccagttactgtaatgtcgcttcgcaaaatggatgctaatttaaagcggccgtttcatccgcattttatgtcctggttggcgccatttgcatttgtcttgacgagcctttcaatttattggacaatgtggccgacgactgttcaggtaattggggttatcttattaggcttaccaatttatctttattatgaagttaagtatcgtcacgcatcagggctacgtgacttacgcaatagttattggatgttggtttatcttgtttttatctcaatagtttcttacattgggagtgaaggatttggcggcaaggactggttgaagtacccatgggattttgttgttattatcatctgctcgctaggattttaccggtgggctgtggctagccggatgaaaaaagtcgatcctgcggcagaaaaggttaatgccaaggtaaagatgccaggaaaagatcaatagatatatttgtaggttgcaaaattaaagaataaattgtaatattgtcacctacttaaaaagtgtaaaaatcaaaggagaaatagtatgtggcgctatttgaaacgtgttttaatcgggaaaccgttaaaaacccttgatgaagggcaaacacacttaactaaatttaaagcattagccatgctttcttctgacgcaatatcgtcagtagcatatggaccagagcaaattacaactgttctggtaactttatccgcagcagcaatctggtattcaatcccgattgcggcagttgtgttggtccttttgttagctatcacgttatcataccaacaaatcattcatgcctatcctagtggtggtggtgcttatgtcgttgccacacggaattgggggagtaatgggggattatttgctggaggatcattactagttgactatatgttaacggtggctgtttcaacgacatctggagttgaagcgattacttcggcagttcctgctttatataaattttcaattccaatcggaatcgttattgtccttttaatcatgtttatgaatttacggggaatgagtgaaagtgcaaacttccttacaattccggtatatttctttgttattatgatgattgtgatggtagtgtggggtggctataatattgccactggtcatattcattaccgggcaattgttgattatggaacaccggtatcgggaatgtcatttgttttgcttattcggtcattctcagctggttcgtcatccttaactggggtggaagccgtaagtaatgctgttcctaactttaataagcctaaagaaaagaatgcatcaactaccctggcaattatgagtgctattttagcgttcttctttattgccattatcttctttagtttttatctgggggtagttcctaattcacggacaacaatcctctcccaaatggccgcacaaatctttggtgggcatgggctaggcttttacctcttgcaactttcaactgcaatgattttagcggtcgctgctaatactggtttctcagcctttccaattcttgcctttaatatggccaaagataaatatatgccgcacgcgttcatggatcgtggggatcggttaggttactctaacgggattatttccttggcgattggagcaattattttgatcttgatcttccatggtcagactaatatgttaattccgctttatgcagtaggggtatttgttccatttactttatcgcaatctgggatgattattcactggtttagagaacgggaaggtttctggttagggaaagcctttattaacctagtaggagccttgatttcatttgttcttgtcatttgtttgttctggcaacactttgcaaatgtttggccatacttaattatcatgccgctgcttttatggatgttccattcgattcaccggcactatgtaaaagtagccgctcagttgcgggttactgaaaagacgaaagttcaattacatgattacgatggtgcaacggtgattgttttagttggtaatgtaacccgggtaactcgtggtgcaattaattacgctcggtcgattggtgattatgttattgccatgcatgtttcgtttgatgaaaatccaggcaaagagcataaaacagcaaatgaatttaaagctgaatatccagatgtccgttttgttgatattcactcttcgtaccgttcaatcgcaaaaccaacgttacgttttgttgatgtgattgcaaaacgagcagaagcaagaaattattcgacgactgttcttgttccgcaatttattcctaaacatccatggcaattggccttacataatcagaccagtgttcgtttacgggcgttattgaattcccgagagaatattattgttgctagttataactatcatcttcaagaatagtttatttagagagaaagtattgatttaatgaataaaaagcaactattatgggggcttttgtttgcagttggccttttcatggcggcaagttataccattgataatcgtggctttcattctggaatatacggtatcattggctgtgctttgatcttaatcgcgtatgcgggaatgaattgggaaaaactgcaatcaaaagatcaacatacgagaaaaattttagtgcttttgagcagtattttagggattatcattgtccttgatattgctgaaatgattttaggataattaaataaagcttattgagggagcgagacagaagtcacttgtgacttcgtttttcgacgcgaagctagcctctgggagcccccgcaagcaacagtaggcctccaatgttcggttttgtcggacgttggaggccattgttgtactgcgtatttgctttttatgaaagtaacttaacttatgtcacagtcctttttatattaactaataagctaaatcatattatcctttttgctagtcggctaacaaaaaggagagatgaaaattgctaataggtcgtctagtaaaacaagctaacaatgcgatgaatcaagaaatgaatgcatttgcgcagcagtatggattgacaggaacgcaaatgtcgattattgattttttaacgcatttcccgggaaatagttgtgatcaacaccagattgaaaatgaatttggaataaagagatcaaccactactgtattacttcaacgaatggcaaagaaaaatttaattgaatgttatccgtcaccagaagatcgccgtcaaaaaatcgttacgcttactgcagaaggccaaaaattatcttcagatgtaagtgcgtatattacacaatacgaagagaaattaaaagcagattttagtgaacaggacatttcgaaaataagacgattcttatcaacgatgatagaggagaaataatgagtacgaatactgaaaaaatttcggcaaaagttgttgcagcgattgtggcaaccggattgatgtcattttgtggggtaattgtagagacagcgatgaatgtgacttttccgatcctgatgcgtgaattttcgattactactaatcaggcccaatggatgacttccatttatttgctcttggttgcaatcgttgttcccttatcggcaattttgaaaagctcttaccgaacaaagatgctttttacagttgcaaacttgctttttatcagtggaataattattgatgcactggcgccattatttggggtgcttttagttggtcgtacaattcaaggaataggaactgggattgcattaccattgatgtttaatattattatggagcaagttccaacaagcagaattggctttatgatggggagtggaaatcttattactggagttgccccagcgattggtcctacttttggtggaatcgttgccagcaagcttaattggcggtgggtattttattcattaattccgcttttaattatttcgtttgtgcttggtgaatggggaattacccaaaaatcaccgattaaaaagcaacaaattgatctttttagtatattaatgattgtattcatgttctgtggttttgtaacagaatttagtaacctgggaagccaagccttcatgaccttttcagttggtagtgcattgttaatcgggatcttaggaatgggactttttgctcggcgttcattaaccctaaaagaaccaattttacaattacgattatttagaaataaaaaattttctgggcatattcttggtttctttttaacccaacttatttcgttaggctttgcatttcttttaccaaactatattcaattggtaaatggtaatagtgcaatgacagctggcttgattgtccttccggctggttttgtgggtgcgatatttgccccattgggaggaggattttagataaatttggcgctcgcaagcctattttgattgggacttcattatgtctaattgcgcttattgcttttacaatctatggatagcatttaacaaatatatttattgcgcttgtttatattctctatatgggtggaatgggaatgtgcatgggttgcgtaatgacaagtgcattaactgttgttggtaaagcaaagcaatcacaaggaaatgcgatccttaatactttgcagcaatttgccggggcaattgggacctcattagtagcgatgattgttgcagccagtcagagtcatctccacacgactagacgtatctctacggcaattggtactcaagaagcttttggcatgttaacgattttttgtattataatttggataagttactatcgaagtgtgaaaaaataaaatatggtggattatagaatgaagttagccacccagttggtggtaaataaaaaacgccattcggcgtgacatcaggtatcatattaagtgaaccaaacctatatgaaaggatgtccgtcaaatgacgcacttaaatgataccatgtctactagtttattgactactcataaaaagaatgctcatcttactaaagaagaacgtgtgatgattgcgactttaaagtcgcaaggactttccaatcgcgcaattggtcgccaattaggagttaattatcaaacaattaataacgagctcaaccgtggtacggtccgccagcttcgtcgtcaaaaatctaatggtaagatttacgaatattcttactacatctatagttatgaagctggtcaggccacatatcttgaacatcaccgccattctggtcgtcgttgcttatgttattcttcaaagcaatttttacgattagctgatcagctaatgcttggtgagtttgacgaccaacattactccccacaagcggttatttataaggctcaagatttaatgaatgatggcaccctgatcccaaagtcggttgtaactttatatcaatggattaatgagggtgtgcttcgtacgtctaatttagacctctttgaaaaacctaaacgtaagcatcgtcgaactcatccgcaagctaaaaggtgcttagggcctaatattgctcaacgacctcaaactgcggaccaacggtccgaaattggccattgggaactagatacagttcagggacagaaaaacggtaatgacagtgttgtactagtaatgactgatcgcctttcacgagttaatatcacgagtaaaattgctggtaaaactgcgcatgcagtaaatcaattctttataaatttacgccagaaaatgggcacagatgcttactatcgcatctttaagacaataacctctgacaacggttcagaatttagtgagttaacacaagttcacgatcatgttttctatgctgatccgtattccccttgggaacgtgaatccaatgagatcaataaccggtttctccgcaaggagattaccaaaggtgaagctataaataactatagtagtgctcagatcatagcgactaatgattggatgaatcactatccacgagctatgtttaatggacattcgtcaatggatatctatcgtaaggccttctaccaagagatatcacagctccatcaaccaataatcaattggtcagtattatttatttgagtccagtggctaacttattcttgaaatttaggaaaaataaaatattaaaaaattcaggctagaaaattctaacctgaattttttaatatggaatttcgttaaatcgctgatcgccctcagttatttgaagctggtcgttaaaacgattaatgagcttttctttgacatcttttaagtccgtttcgtttacataaatacttgtttcaacattaaccccgtactcctcactagcaacctcaagattgttctccttgaggtagtaaagaaggagatcgtgaagagcataggtaacagtgatttttagaatttcttgcttgatccgttggacgagaccagcctggtggattgcttcagtagttgtattgctatatgcccggatgagaccacctgcgcctagcttaatcccgccgaaataacgggtaaccactgctacgacattgtggatctttgcaagtttaagcgattcaaggatcggaattcccgcagttccgcttggctcgccattatcactttctcgctggatctggtcgttgtcaccaatcatgtatgcaaaacaattgtgagtagcttttttattagctgcttgaatactggcaataaactgttgagcttcttcatctgaggagacacgggcaatggagcaaataaatcgtgattttttaattatttgctcataagtagtgtttttggcaattgttaaatatggttctgtcatttttaaacttccttcgtgctattttaattagtttacgtatatataaagtaggaggtgaataatggatctagaaaattattatgggagacgagtcttggcttcgcgtcatgaggtgaaacaatcaggaattcaagaactgccaacaatcagaattgacgctggtaatatcagatgctatcgctgcaatcatgtcacggcaaaatcgctgggcgctttgccacaaggcgagttctattgtccgcattgtattaatcttggacgcgtttcaacgttaaataaattttatcatgttccagagccaaatcaatttacggttaccgaaccggtattaacctggaaagggaaattgtcgcctcttcagcaacaagcttcagaaaaaatttcccggggaatggctgaccatgtccaacaattattatgggcagttacaggtgctggaaagactgagatgatgtttgcaggtattgcggcagctattgaacgtggtgagagaattggaatagcttctccacgagtagatgtttgtttagaattatttccccgtttaaaagctgcctttgctaattgtgatattgctcttttgcatggtcgacaagaattaccttatcattatgcccaactgactatttgcacaacccatcaattgcttcgtttctatcatgcttttgataatttaattattgatgaagtagatgcctttccgtatgctgctaatgcttcgttattatatgcgactaagcaagcaataaaagagaacggagggtgtctttacttaactgcgaccccaggtgatgctttgctgcgagaaattaaaagtaaacgattagttgttaattatttgcctcttcgttatcatgggcatttacttccacaaataaaagttagactagcttttggatggcggcgacgattagaacgtcagcaattacccccgcaagttattcaacagttgcaggaaacgctaaaggaaggccatcactttttgctatttgttcctcatattgcagatttagcattggttgaagctgcattacggcattcttttacaactttccgctttgctactgttcatgcaagtgatctagaacgattagaaaaagtccaaaaaatgcgtgatggtgattacgactttttagttacgacttctattcttgaacggggagtcacttttccagaaattgatgtctatgttttgggtgccgatgatccagttttttcctcctcggcattagtgcaaattgctggtcgagctggacgttcgcaaagtcgaccaactgggcgggttattttttggatcaattgtaattgtcgacaagttaatcaagctgtttcccaggtgaagtacttgaatcggaaaggtcaaaggttaatagatggagtgtcttttgtgcaataaagggatatctttccaactaactttgaaagatatttttagctttcgcgaaattatcacgccagtagtctgcactaaatgcaaagaaagttttgtgcgctgggatgatcacggatgtgcaggatgcggtaaagaaaatgttaataaaaatggtttcttatgtgcagactgtcagacttggaagaaactttatggttggtacttgcatcatcgaggattatatcggtataacgaggcgatgaaagaatatatgcaacgttataaatttaatggcgattatcgtttatgcgtggtatttcagcgtgaacttagcaaagtggttaatgaacagaaagcagatttaattgtcccgattccagtaacgtcgacaacgatgcaaacgcgtggctttaatcaggttattggtctattatgcgaagtaccttaccaatcgatcttacgaactaagataagttcaaaagtggcacaatcaagcaagacaaaggaagagcgacttgcaactaaacagccattcatacttgatgcaccagaaaaagtaattaataaaaaggttcttttagttgatgatgtttatactacaggaaggacactgtatcatgcggcaaacctttttaagcaagctggctgtaaagagattggtagcgtttcactagcacgttaaattcttcttaaaatgtattaataaaatttgttaattaacacaaactaatctataataaaaataggatatgagaagagtggtccttctgatatcagatcaagcaattgcttggctgaaaggagagaagtacaatgttaaagttcaatattcgtggtgaaaatgtcgaagttactgagtcaattcgtgattacgttgtaaagcgaattagcaagcttcaaaagttctttgaagatagtgttgaagctaccgcccacgtgaacttaaaagtttatccaaaccggacgtataaggttgaagtaacaattccacttccatacctaacgttgcgggcagaagagacttctaatgatatgtatggaagtattgacttagttactgataagcttgaacggcaaatccggaagtacaagacgaaggttaaccgtaagtcacgtgaaaagggcttaaagaaccttgaattcatcccatctgataatgatggaacagatggacaagatgatgaattaaagattgtacggacgaagcaagtttcattaaagccaatggatcctgaagaagctgtccttcaaatggatatgcttggacacaatttctttatcttccaagatgctgaaactaatggtacaagcattgtttaccgtcgtaatgatggtcgttatggcttgattgaagctgaatagtcaatgccaatatgaagagcgcggatgagaaatcattggcgctttttgtatcttataacttatagccaccttgtaatatccatactaataatttttatttatactatgaacgtggtaaaatattatggttagagtaaaaaacataattggcttgagtagtacttttttattgattttggacttaagccagaaagtaggaaggacgcttttatggccaatattctaaaaaaatggattgaaagcgatcgtcgtgaattacggcgaattaacaaaatagcaaataaagtcgagagttatgctaaacaaatgtctgaactaactgatgaacagcttcaggcaaaaactgatgaatttcgggaacgttataaaaagggtgaatccttggatcatatgttgccagaagcattcgcagtttctcgtgaaggggctaagcgggtcctaggactttacccattccatgtccaaatcatgggagggattgttctccacgaaggtaatattgcagaaatgcggactggtgaaggtaagacattaactgccacaatgccggtttaccttaatgcaatctcgggaaaaggtgttcatgttattactgttaatgaatacttgtcaaagcgtgatgctactgaaatgggacagctttataattggcttggatgttctgttggtattaacaactcagagatgagccctgatcaaaaacgagaagcatataaagctgatattatgtattccactaatagtgaaattggatttgattaccttcgtgataacatggctgtttacaaagaagaccaagtccaacgtggtttaaactatgctttagttgatgaagtggattcaattttaattgatgaagcgcggacaccattaatcatttcaggtccaggaacgggcacttctaagttgtacaagcaaactgatcggtttgttaagcaattaaagaaagatgttgattataagattgatcttgaatcgaagacagtttcattaactgatgaaggaattaaaaaagctgaaaaatacttcaacttaaagaacctatatgatccagaaaatactgcgctgacccaccacttggatcaagcgttgcgtgctaactacatcatgcttttggataaagattatgtggttcaagatggtgaagtattaattgttgattcctttactggacgtgtaatggaaggtcgacgtttctctgatggtcttcaccaagctattgaagccaaagaaggcgtagagattcaagaagaaaacaagacaatggctaacattacataccagaacttatttcggatgtataacaaactggcggggatgactggtactgctaaaactgaacaagaagaatttcgtgaaatttacaacatggaaactattactatcccaactaaccgtccagttcagcgaaaagatgagcccgatttgctttacccaacgttacaaagtaagtttgtagctgttgtcgatcggattaaaaaacttcatgctaaagggcaaccaatcctagttgggacagtcgccgttgaaacctctgaatacttatcccaactgcttgataaagagaatattccgcatgttgtcttaaacgctaagaatcacgctaaggaagcggaaattgttaaaaatgccggtcaaaagggtgcagtaactatcgctaccaacatggcgggacggggaacagatattaagttaggccctggcgttcgtgaaattggcggactagcagttattggtactgaacgacatgaatcacggcggattgataatcagcttcgtggacgttctggacgacagggtgatccgggattatcacaattctacctatcgcttgaagatgatttaatgaagcgatttggtggagaccggatcaaagccttcttggagcggatgaaagttaatgatgaagatgctgtcattaaaagtcgtttcttgactcaccaggttgaatcagcacaaaagcgagttgaaggtaacaactacgattcacggaagaatgttcttcaatatgatgatgttatgcgtgaacagcgtgaaatcatttataaagagcgacaacaaattatcactgaagataagtcgctgaagtgggttcttatgccaatgtttagacggacaatccagcgtgaagttgatcaacatactcttggtgacaagaaggattgggatttacaaggaattgttgactttgcagaagaagtcttaatcaagcctgataccatcacagttaaggatctagaaggtaaatcacctcaagaaatggtagattacttgatgacatttgcccagggagtttataaggaaaagcaaaaacaactttatgatccagcacaaatgcttgaatttgaaaaggttgttattttgcgggtggttgactcacactggactgatcacattgatatcatggaccaattccggcagtcagttggtttacgtggatatggacaattaaatccattggttgaataccaaactgctggttatcacatgtttgaacaaatgattgctgatattgagtatgaaactactcgactcttcatgaagtcagaaattcggcaaaatgtaacacgttaattgttaattactactaggtacggcagtaaggtaacccatggcggtaccgctgccgtattgttgtataacggaggttcgattgtggaattaaatgaagcaaaaaaacaagtagaatcaatgcaaaaagaagttacgcacttcgggaggtctctttgacttagatgcactagatgagcgcattgcagaaattgaacaagagatggctcaaccagacttttggaatgataatgagcaggcacagaaggtcattgcggaaaataatattttaaaagaaaaacgggatacttttgtgaatttacgtgatcagattagcgatcttgaaacgtcgcttgaattgctcgcggttgaaccggacgatgatttacaaaaagatttcgaagcatcatttacaaatacacaaaaggctttagaacagtatcgcttaacgcaacttcttgatggggagtatgacgctaagaatgctatcttagaaattcatccgggagcaggtggtactgaagcccaagattggggtgaaatgcttctgcggatgtatattcgttggggtgaacagcatgctttctccgttgaaacagcgagttatgaagccggtgatgaagcgggtatcaagagtgttacgctgctaattaaagggcataatgcgtttggttatcttcgtagtgaaaagggagtccatcggcttgttcgtatttccccatttgatgcggctggtcggcgtcatacatcatttgcttcggttgacgtaatgccggagttggatgatagtgttgaggttgatattgatccatcagatttacgagttgatactttccggtctagtggtgctggtggtcaacatattaataaaacagaatctgctgttcggattacgcatattccaaccgggattgtaacctcttctcaagctgaacgatcccaacttcaaaaccgagttactgcaatgaatatgttaaaatcaaagttgtatgaactagaagaagaaaagaaagctaaaaagcgggcggaaattgagggcgaacaacttgatatcggttggggttctcaaattcgttcatatgtttttcatccatacactctagtcaaagataatcgaacaggttatgaaacccataatggacaagctgtaatggacggggaccttgatccatttattgatgctttcctacagtggaaacttagtcaaaagaatcctcaataagttatttagtttggaaggaagtgagtaaagtgcgcgaaagtcaacataaaagattaactcgctcaggatcagatcgaatgatagctggtgtatttggtggaattggccagtactttaagattcagccaaatattttacgtactttatatgtcttactgactatttttaccggttttgttccaggcattattatctatattattttgataataataatgcctgctgatccgcaaaatcccgatttactaggatttttaaagtctttcagtgaatcacaaaaaacatctcaacagcctcaccaacgttctcggcggactttaacgaatgtcgaggaaaaagacattaaaagaaatggaagatcatgatggaattttggaaaagagtattgattgatacaatcctttttattgcccttgctggtttatttgccggaacagggatgttttatattacaagtgcttggattgcaccattggcaagctttgttttagcaattttgaacgttgctattaagccaattttagtaattttatcgttgccgattaatattttgaccctgggcctttttagtgttgtaattaatggaattatgctacaactaacatcgatgcttgtcgggtcggcaaactttcatttttcgtcatttggttctgcaatgttgattgcgattattatggcaattttcaatgcagttattacaagtcacgaggatagattgtaaaggagtggagaaaatgccaaacaatgtaacggtgcaagaattagttgataaggtccggttgaaagtcttacaaggagaagattacctccaacgtaagataacaactagtgacatttcacggccagcacttgaatttgcgggatattttaagcattaccccgcagcacggattcagctgttaggaatcaccgaaacctcatttgctaaagacttaactcatgagcaacgtgaagagtacatgacaaaaatgtgtatgccacaaacaccatgttttgttatctcaactaatctgccaattcctaaggagctaaagaaggcggcggaagatgcaaaaattccaatcttaggaacgcatttaacctcttcccaaatattaagtaacatgacttcttacttgcttgaacgtttggcaccacgaaaatctctccacggtgtattagttgatatcagtggggttggagtactcattactggtgattcgggagtgggtaagagtgagaccgcgttggaacttgttcgtcgtgggcaccgactgattgctgatgatcgggtagaagtttacgctcgtgacgaacagaccttggtagggactgctccgcaaattttaaaacacttaatggaaattcgtgggattgggattattgatgtctctacgctttatggaacaggagcaattatgccttctgatcaaatcagtttaattgtacatcttgaaacgtggactccagatgtacagtttgatcgtcttggtgatcgtggagatactcaaataattcaaggcgttattgtgcctaaagtttctgtcccggttaaaactggtcgtaatttagcgattattattgaatcagctgcaatgaattatcgggccgagacaatgggctatgatgcgactgaaacatttgatcgaaaccttaaccagttgattaagcagaattcagaacgtgatagtaaaaataacaaggggtcggcaaactagatgattaatccaggaataaaagccgctttaaacccaattgctttccaagctggtccatttactattcactggtatggcgtcattattgctagcggggtagttttggctctcttgttagccgttcgcgaaggaaagcgagaaggaatttctgaagatgatttttatgattatcttttatgggcgctcccaattgcgataatttgcgcacgaatttactatgtagtatttcagtggagctattattctcagcatccaagtgagattattgctatctgggatggtggaattgcgatatatggagcgattttaggaggctttattgttttacttgtcttttgccattaccgtcatttatctagttggctgatgatggacatcattgccccaacccttattatggctcaaggaattggccggtggggtaactttatgaatcaagaggcatttggtgatattacgacacgggcgcatttaatggctcagcatattccaaattggataataaaccaaatgtatattggtggtcactatcgaattccaacgttcttatatgagtcactatgggatttaactggctttgcattactaatgttacttcgtcatcgcaaacatttatttcgtcgtggtgaaattttcttaacctatgtaatgtggtatgcatttggacgtttctttattgaaggtatgcggactgatagtttaatgctcggaaatattcgcatttcacagttactttctgtagtgttttttgttagtgcattagtaatactaatagttcaacgtcataaaaacattccgtggtatgataacggaataaacaaaaattaattgaattggataaggagaaagaattatggcagaaaaaattgctgttttaggtgctggttcatggggcagtgttttagcaaacatgcttacagaaaatggtcacgatgttacattatggtctcgtaatgaggaacaagttaagcaattaaatactgaacatacaaatcctcgctatatgaaagattttgtttattctactaaattaacagcaacaacagacatgaaaaaatctgttaagggtgccagcgtgatactgattgtgattccaacaaagggtcttcgtgaggttgctaagaaattaaacacaattttgactgaattacaccaaaaaccgttaattattcacgcaacaaaaggcctagaacaaaatacatataagcggccatcagaaatgcttagtgaagatatttctcctgaaaatcgtcaggcaattgttgttttatcaggtccgagtcatgctgaagatgtggcaattaaagatatgacagctgtaactgcagcttgtgaggacctaactagtgctaaaaaggcgcagaagttatttagtaattcttatttccgtgtttatactaacgacgatgtaattggtgcggaatttggagcagccttaaagaatattattgcaattggtgctggagctatccaaggccttggctaccatgataatgcacgagcagctttgattactcgtgggcttgcagaaattcgtcggctgggggttgcttttggtgctaacccaatgacttttattggtctttctggtgttggtgaccttgttgttactgctaccagtaaaaattctcgaaattggcgtgctggctatcaattgggacaaggaaaaaagcttcaagatgtaattgataatatgggaatggttatcgagggggtctataccactaaggccgcttatgaattaagtcgtaaacggcaagtacagatgccaattaccgaagctctttaccgtgttttgtatgaaggtgaagatatcaaaactgcaatttctcagttaatggaccgagatcttacttcagaaaacgaataaatatggtaaaatactagaggatggatattgagagaaattgaaacatggaaagggttttacaagtatgaaacgtgttagaaaagccattattcctgctgctggtttaggaactcgttttcttcctgcaacaaaggcattggcaaaggaaatgttaccaattgttgataagccaacaattcaatttattgttgaagaagcgcgcaaatcaggaattgaagatattgttgttgttgatggaaagaataagcggtctattgaagaccactttgactctaatccagagctggaagataatcttcgttcaaagcacaaggacgagatgttaaagatggttgaagaaacaactgatgttaatatttacttcattcgtcaatctcacccacgtggtttaggggacgctgttttaactgctcgtgattttatcggggatgaaccgtttgttgttatgcttggggatgaccttaataacattaacaacaagaatgaagctttaacgaagcaattaattgaaagttataaccaaactggcgcatctactcttgcagttatgcgggttccacatgaagatactgcaaagtatggtgtaattaaccctagcaaggaagttacgccagggctttataacgtaactagcttcgttgaaaaaccagctcctaaagacgcaccaagtgatttagcaattattggtcggtatgtctttactccagaaatctttgatgtattagcaaagactaagccaggtaagggcggcgaaattcaattaactgatgcaattgatactttgaaccaaactcaacgggtattcgctcgtgaatacaagggtgaccgttacgatgttggtaataagttcggctgggttaagacaaacattgaatatggtttggaacacccacaagttaaagaagaattgcgtgaatacattaaggaattaggcgcaaagcttgctgctgaagataagcaaaataattctaagaagtaagactagcattggcctgtaaaaaataaaccttcaagattcgttatagggatcttgaaggtttattttttacatatcttcaacaactacatattccatatcaagtgggccgtgaacaccaacgattaacaccatttcaatatcaccagaattggatgggccggtaataaagttgatgtttgatgtttgtaaactaccatcctgaattgccttttgataataatccattgcttgccgtgaacgtggtaaaattttgctttttggcacaatagctaggtaatgagttggaagaaaatgaaacatccgtccttgttgtgggtaggtcgcaactgttacggtccctgactcagctaatagaaagtccgcaaagccaattgctccatcactgttatttgcatttacaatgttttgccgcccaaattcaggttcccaatagtaaataggatctactcgtaaattatcttgccatttccccaatgaataatcttgccatttttcttcatcaaaggagggaagcattaaacttttaatctccttttcttggataaaatcattaagagtgtggccaagatcggctgatttaacaacatggaaatcaacatgaacttcttcgctatttttgcgtgcaagttcaagaagttcatcttggctttttccagcaagggtagtttctggaagattattaacggggacaaatggattttcaccaagcgtatggcgaggacgattggcagcctttgcaattcgatttaagaagtcttcttgatttttagcggtgtttgcttcttgtaagtaatcagtcattttcttgctcctcctcttcttcgtaatgacgataccaatgccggaagttttggtggtactttggtggaacagcaagatcacgaacatctacccagccatgagctagtttaggagcaattgcgggaaggtggttaattttaccatctggataaaggttcttaatgtctttaggagttgtcttcttgccaaatggctcaagagcaatatgagcaaatcgcattgcatcattaaaaagcgtaggggagctcgtacctttaccaactgccttcaaaagagcattcgaaggactgtgatctaaatgaagttcatccatttctacataacggtgatgacggattaactcatgaaggggaattttaacaggacaagtttccgtgcaagcagcacataaactacatgcatatggcaattccttgaattcttgataaccgcctaaaatcggcgaaagaacttcacccattggtccaggataaatcgatccatatccctttccaccgacttgccggtaaacggggcaaacgtttaagcaagaaccacaacgaatacattgcagcattggttcaaagtcagtgttaagcatcttagaacgaccattatcgactattacaacatagaagtcatctggtccatctgcttcatccgcttctttaccttttgagaaagtacagtaactagttagtttttgaccaactgcacttcgacataaaacattgtcaaggacttctgcttctttcaaacttggcacaattcgttccatccccatgactacaacctgggttttaggaatggccatactaatatcggcatttccttcgttggtaacaaggttaatcattccattatcagcaatcgcaaagttacagccagtaatgccaaagtctgcttgcataaagtaattacggagatagtgacggacaaacctagccatatgttcaggatcattgtcaccgtcataaccaagcttttcaaatactttttgaatttgattgcggtttttatgcagcgtggggaaaacaatatgtgttggttcatcccaattatcttcttgcaaaataaattcagctaaatctgtttccattaatgaaagtccggggattgtgagtaattctttatccaatccaatttcagtagtcaccattgacttagatttaacaacatgatgaacgtttttcttgattgccaattgtttgataaaggcacttgcttcgttaccatccttggcaaagaaaacatgaccaccatttttttgaacattatcgctgaattcttcaaggtaatccgggagatgcttaatgacgtgttgacgaatttcagcagaaagatcacgccagccttcccagtgtcctaattgacgccgtgcttcagttcgtttttgaaattgagcgtcttgtgctttagcaaccgatgcccgcataaatttatcggcttctgcgtctttaattcgttcagtaaaaggcttatcgcttgtggctattcccatctaaaacaccccgtttccgtttgctggtaccattacatgatccgtatctttgacataagtgattcggctagtatcaacgttatgattaaggacctcagcaatgtgcataattgtaatatgagagccatcacggcgacggttaattcgtccaccaatattcattaaacatgtttgctcgcaagcaataagaatatgtgctttcgtcttcaaaacattatttgctttatcatcaaccatcgcttcagagagaaggggttctttagcagagaatgttccaccaaagccacaacataattgaatgttatgaaggggaataagctcaagtcctttaacatgttcaagtagaacgatgggggctgtccgttcaccaagaagacgggtcatgtggcaagaacggtgaaaggttgctgtatcatctagttctgcaccacaatcaagaataccgagaacccggtaaataaattgcgttagttcaaaagatttatcataaaggatttgcgctttcttcgaatactctggatcatctttgaaaatgttcttgtattcatgaagcatggcaacacatgatccagaaggcccaacaatataatcggcgtcaatacttaaaagggcatcgagttgatttttaaatgtagtaattgtttcacgatcataaccgctattataagttggttgtccgcagcaaatttgtttatcggggaaaaatgtttcgcagccaaaacgttggagaagttcaaccgttgcctttccgacatctggataaagcagatcaacaatacaagtagaaaaaatacagactttcatacatgcgtgcattaattggatgcacttcgcctccttaaaaatcgaaaaaatataattgcttatcataataagtataactcaaatatgataatattagagttgaaaacgatttaattatttgaaactaatatataaaatcataatattgattatagttcgacaagaatattactattaaaaagtaagcaaaatgatagacaaaaagatccaaagtctgtatgatatggatagtaaaaaaattgttcgaggaggaagagagaaatggctgaaaataagcaatatgatgttgtaatcatcggtgctgggccaggtggaatgaccgcagcgatgtatgcatcacgagcaaacctatctgtcttgatgcttgatcgtggaatttacggcggaaacttgaataatactgctgaaattgaaaattacacaggattcaagagtgtgaagggtcctgaacttgcccaacaaatgtatgaaggtgcaactcagtttggcgcagaatatgcttatggaacagtaactaaagtagaacttgatggtgacttaaagaagatcactactgacatggatgaaacatatactgcaaaggcggttgttatcgctactggctctgatcagcgccacctcaatgttccaggagaagaagaatttggtggccgtggtgtttcatactgtgcggtttgtgatggagccttctttaagggaaagcatttaatcgttgttggcggtggtgatgcagctgttgaagagggagtttacttaacgcaattagcctccaaagtaacagtgcttgttcgtcgtgatgagctccgggctgaaccaattattcaagcagaagcgatgaataatgacaagattgagtttgtttataacactagtgtgactgaaattgttggggatgatattaaagtaacaggtgttaaaactcataataataagactggtgaagatggtgaaatggctgcagatggtgtcttcatttatgttggtaatttcccaaagaccgctgcttttaagaatttagatattcttgatgatcaaggctgggtaaagactgatgagcgaatgcggacagcagtaccaggtatttttgccattggggacgttcgtgaaacaccattacgacaggttgcaacagctgttggtgatggagcgattgctggccagcaagtttatcaatacattaaatcgatggattaataaaaaggtgttagagaaaagctctagcatctttttttatttagtggtatagttttgattaaaatttagttagaaaaggagggcgattaccattggaaaatgatgaaaaaataaaactattacagaagttaattcagattgatacagtaaatggtaacgaaaaggacgaagcaagttatattaaaaggaccttagaagatcatcatatttcctgtgaattagttccttttgcacccaaccgcaccaatttaattgcggagattggtgatgaaaaggggccggtactcgctctttctggacatttagatacggtagctgcaggtgatttccaaaaatggacatatccaccatttgctggccaattagtagacggtaaaatctatggtcggggagcagttgatatgaagtcgggattggcagccatggtgggtgctttaattgagcttaaagaagcaggtttgccaaaacatggaaaggttcgcttgattgccactgttgatgaagaagttggtggtcaaggttctcttgaaatgactgataaagggtacgttcatgatgttgatgtgatggtaattggggaagcaactactggccaaattgaatatgctcactgtggctcttttgattatattgttgagtcttatggaaaattggctcatagttcgcaaccagaattgggaattaatgctgttacaaatctagtgaaatttatcaataaagaatcacgggcgtttgacgatgcagcagtaagtcccaccctaggaaaattaattcatagtgtgactgtctttcatggtggagagcagttaaattcaattcctgattacgcatatttgaaggggaatgttcgcacgattccagaatgtgataatcgggaaacaggaaaaagactacaatcaatcattgatgagttaaacaaggagacaggggttgaattaaaactaaagatagttgctagttttatgccagtggttacaaataagcaagatcgcttcattgcacttgctcaaacggcaattaaaaaggttagcggcaggcaaccggatgtagtgatttctcatggggcaacggatgcatcccgctatgttttagacaatcacaattttccaataattgaatacggaccagggattgaaaagttatcacaccaaattgatgaacgtattgcgcttgatgattatttaacggctcagcaagcttacgttgaaattgctaaacaatatttgaataatactaaagacgatgaacaggctagtagttaagcatgaccgtacagagactccagctggtggaaaaggagcttttatgctaatgaatcacacctgggagtaaagattttttgactgaaagaagaatccgggagtcacccgttatcacaaagagtttcgtcgcaaatgactgaacttaatgaggcagttgctgtgaggtagctgtgaaaaaaggtggcaccacgcatactaaatacgtcctttgaagatttattcttcagagggcgtttttttgataaaggagaagatacgtatgaagaaaaagataattaatttcggattagttttaatattgcttttacctttaattgtttttgcaagtggctttaagattcaaaatgagaattaccgggcaaaccacacagatacgtgggaaagaataaagaagcggggaacattacttatcggggttgatgatacctttgttccgatggattttcgaaaaaagaacggtcaattggttggttatgatgttgatttatctcgcgcagttgcgaaagttttaggattaaaagctgattttcagtcaattgattggtcaatgaaggaaaccgaattaaaaaatggcacaattgattgtatttggaacggttatacagctactccttcccgacaaaaacgaattgcatttagcagagtttatgagctatctggccaatcattggtggtacgaaaagatagtaaaattaaaaatttcgcggatatgaaaggaaagacgttgggaattcaagaaagctcaactgctcaaactgattttgacaaatatccccaagtattgaagaaactagttaaaggacagaagccaattctttatcaagataactcgagtgctttcatggatctgcaagcaggccgcacacaaggagtacttgccgggactgtctatgccggctattatgcgacccacattgcaaataataataattataaattgatttcagcatctgcttatcctgcagaccgggttgcgattggaatgaggaagggggaccggacgcttattaataaaattaactatgctcttggggttcttcaaaaagatggtaccttacgacggattaataaaaaatggctaggaattaatagtaattatctgggaccggttgctgaatttcaaaaatccaacaataatcgttaatgatttgttaaaattttatataacaaggactaaggaggttttttaatgggtgcaatcaaatgtaatgatacattagcggtgtcaattcatcggattcgtaattcagatttaaacgaacacgggacagtatacgggggacgaatcttggaattaattgatggtcaagcctcggtagcagcaatgcgagtagctcgaacaacagttgcaacagtatcaatggatgagatccaatttctgcgaccatttgaccttcaagattcaatgtgtatggaggcatacgttaccggctttgggaagcgatcaattgaagtatttacaaaagtaattggtgagcacttgatgaccggtgaacgtttcctcggcttttattgttttatgacttttgtaattcttgatcctgaaaaacaaacggcatttaataaattaattccggaaactgaagagcaaaagacgttaatggcaacatattctcaacgtgttaagcaacggcaaatccagcggcaaaaacagcaagaatttctgcctcatatttcaatttccaagccgtggtaaaactttagtaaatttttaagtaaaaagcgacagatagcattttatgcggtatactaaaaagcagagtatgacataaaggagacattattgtgagctggaaagatacttataaggtttggcaagaacgaacagatcttgaatcagacttaaagcaagaattagctgcaatgagcgacgataaagaaattgaagatgccttttacggtccattatcattcggaactgcaggaatgcggggactaatgggaccaggaattaaccggatgaatgtttacactgtccgtcaagcaactgaaggtttggcaactttaatggattcattgggtgatgatattaaaaaacgaggagtcgctattggttacgattctcggcacaactcccgtaaatttgctcatgatgctgctcgtgtattaggtgctcatgggattaaggtttacatctatgataatttacgcccaacgcctgaattgtcatttgcagttcgtcacatggggacttatgcgggaatcatgattaccgctagtcataaccctaaggaatacaatggttacaagatttacggtgaagatggcggacagatgccacctaaagaatctgacatgatgacaggttacatccgtaagattgatgatatttttgacattgctttagctgatgaacaagaaatgcttgacaatggtttggaaacaatcatgggtgaagatgttgatgctgcataccttgctaatgctaagggtgtaactgttaaccctgaattagccaaggaatacggtaaagatatgaaatttgtctttaccccattatgtggaactggccgaatgcttggtgaacgggcattgcgtcaagctggttttacaaattatgaaatggaaccaactgaagcacaaccaaatggtgatttccctggtttggaacatcctaatccagaattcccagaagcatttgttcgttccattgcccttggcaaaaaagttgatgcagatgtgttgatcgccacggaccctgatgctgaccggcttggatgtgcagttcgtcaaccagatggtgaatatcaattgctaactggtaatcaaattgcttctatcatgcttgcctacattcttgaagcgcataaacaagcgggaaccttaccaaagaatgctgctgcggtaaaatcaattgtttctactaacttcgctgctaagatcgcagaaagttacggcgttgagatgatcaatgttttaactggtttcaagtggatcgctgaccaaattcatcaatatgagactggcaaagctgatcatacctttatgtttggttttgaagaaagttatggttaccttattaagccatttgttcgtgacaaggatgctatccaatccttaactttacttgctgaggttgccgcttattaccgtagtcgtaacatgaccctttacgatggcttacaagaattgtttaagaagtacggctacttccgcgaaaagacaattgctaatacttatgctggtgttgatggcccagctaagattaaggctttaatgaagaagttcagagaagaagccccaactcattttgccggtcatcaagtagtagttactgaagacttcgctaatgggactaaaactacagctgatggcgaagtaagtgaattaggtatcccagaatcaaatgtattgcgttacattcttgatgatgatacttggattgctattcgtccatcgggaactgaaccaaagcttaagttctacattggtacaagtgctgataccttagataaggcaaatgaaaaattagctgatttcgaaaaggctttacaagagtttgctgaataataataactgagagactgttgaaaaaactttgcttttttcaacagtctctgtttttatatacgatattggggatgtcactaagattaaatttttcctcacctttcttgaaatttcgccaaaaaattgtatgattgtacaaattaattattttttgggaggacttcatcgtgggaatgcatgaatatctgaaaagtttaagcgacctcgaaatgattaaccgtgctccaggatattttaaatttgaggaacacaatgtggctgcccattcatttaaagtaacgcaagcagcacaaatgcttggtgatattgaagaacaagccggaaatgaaattgattggcgttctttatatgaaaaagctcttaatcatgactatacagagcgatttattggtgacatcaaaacaccggtaaagtatgctacccctgaattgcgctcaatgctggcgcgggttgataaatcattaacagaaaacttcattcaatctgaaattccggctgagttccgggcagcttatgaacgacgatttgcggaagggaaagatgatactttagaaggtaaaatcctcgcggttgctgataagattgatcttatgtatgaatcatttggtgagatccaaaaaggtaatcctgaaccagtttatatggatatttataagtcgagcttgacggcaattatggattttcgtgatatggctagtgtccagtatttccttaagaagattttaccagaattattaaaagataatgcagatggtaatgctaaaaaccaattagcaattattactacgcaaattattcaacaataatttatgcttttaggcttccttttatcaaatagttgatttttgaaaacgctttcttataatagaagtagaaggtaaaaattaacaaagtaaagggaggcggcaaggatgacaccaagtttatttgcaggaacatttgcaattttagtattgtggctaatcgttgatattatctgggaattgagtcgaccaagagacattgtaatgcggcgcctctgtgcttggcttaatcttattgcgattattggtggtttttctgtattttatggagtaacccattttgataatgctaatcttgttccgtggtttatttgtttgaattggattaatgttgttgccgcgggcttacaattttactttggttactttcggcataattaaatgataaataaaatattttaagaagtgagtgaaaatgggcttgtttggagagattgttttctactcacttttttactgtaaatttatagacgaatacatgtttgggtgataaactaataacagtaaataataaatagttagtgataagtgggatgcggtaatttatgaagttgcgattccactttattttatttaactgcgacgtaagggaggaatttcttttgatttaccggcaaccagataaaaaatttgaactagtgtcagagtacaaaccaaccggcgatcagccccaagcaattaatcaattgacaaaggggattgaagatggtgaaaaagctcaaatcttattaggagcaacaggaacaggaaaaacatttacaatctcaaatgtgattgccaatgttaataagccaactttgattctttcccataataaaactttagctggacagctctatggtgaaatgaaaaaattcttccctcacaatgcggttgaatattttgtttcctactatgactactatcaaccggaagcatatgttccatctagtgatacttatattgaaaaagatgcgtcaattaatgatgagattgataagctgcggcactctgccaccacttccttactggaacgaaatgatgtaattgtcgttgcctctgtttctagtatttttggattaggggatcctcgagaataccaaaatagtgttctttctttgcgcgttggtcaagagattgaacgtgatcgattgttgaccgaactggttaatattcaattcgatcgcaatgatattgattttcaacgggggcgtttccgcgttcgtggcgatgtagttgaaatctttccggcgtcgcgtgatgaacgagcattgcgaattgaattctttggggatgagattgatcggattcgtgaagttgatgcgctgacaggcgaagtgattggtgaccgggaccatgtttctatcttcccggctactcactttatgactaatgaagaagtcatggatcgggcattgccacaaattgaagctgatatgaagaaacaagtaaagaagtttactgatgagggaaagcttcttgaagcagagcgaattcaacaacggacaacttatgatattgaaatgatgcgtgagatgggctatacaaatggaattgagaattattcgcgttacatggatggtcgaaagcctggcgaacctccctataccttattagatttcttccctaaagatttcttattagttgttgatgaatcccaccaaaccatgccgcaagtacggggaatgtataacggggaccgagcgcggaaacaaatgttaattgattatgggttccgcttaccaagtgctcttgacaatcgaccattaaaactaccagaatttgaacaacatgttaatcaagttgtatatatgtctgcaaccccaggcccatatgaaatggaacagacagaccacgttgctcagcaaattattcgaccgactgggttacttgacccaacagttgaggttcgcccggtaatgggacagattgacgacctagttggtgaaattaacaaacgtattgagaaaaatgaacgtgtttttgttacgaccctgacgaaaaagatgtccgaagaccttactgattatctaaaagatatggggttaagggtcaaataccttcatagtgatattaagactcttgaacgaacgcaaatcattcgtgatctccgtcttggtaaatttgatgttcttgttggaattaacctcttgcgggaagggctagacgttccagaagtatccttggtcgccattcttgatgccgataaggaaggctttttacgtaatgaacgttcacttattcagacgattggtcgcgcggcccggaatgagaatggggcagtaattatgtatgctgataccgtgactgactcgatgcaaaaggcaatggatgaaacaaagcggcgacggacgattcagatgaaatacaatgaagaacatcatattacgccgcatacaatcatcaagccaattcaagaagcaattactgttactaagaaagcaacggatgaagctgaagcagataacagtgctgaatttactgacaaagattttgcaaagctagataaagaggcccaagcaaagatgctggatgaattaacagagcaaatgcgctctgctgctaaacgccttgactttgaacaggctgctacgcttcgtgatacgataatggaattaaagacaaaagcaaaaaaatagaggagggattatttcgtggcaaatgataagatcataattcatggggcacgggctcataacctaaaaaatattgatattactattccgaaaaacaagttagtcgttataactggcctatcgggttctggaaagagttctttagcttttgatacattatatgcagaaggacaacgacgctacgtggaaagtttatcggcttatgcgcggcaatttttaggccagatggataagccagatgtagattcgattgacgggttatctccagcaatttcaattgaccaaaaaacaacatcccataatccgcgttcaacggtcggaaccgtgactgaaattaacgattttctccgcttactatgggcacgggttggtacaccaatttgtccgaacgataatattccaattactagtcagtcaccagaacaaatggtggatcgggtactagaattgcctgaacggacacgtctgcaaattctttcgccggttgttcgtgataaaaagggaacacaaaagaaagtctttgaaacaattaagcgtgagggatttgtccgagttcaagtggatggcgaaacttatgaccttgattcagtccctgaattagataaaaataaaaaacatacggttaacgtcgtgattgatcgaatcatcatcaaagagggaattaggtcgcggttatttgactcctttgaatcagcgctccgcttaagcgatggttatgcaattgctgatgtgattggtggagatccaattccattttctgaacaatatgcttgtcctatttgtggctttacagttggtgaattagaaccacggttattctcctttaatgctcctactggtgcttgtccagaatgtgaagggttaggattgaagctcgaagtagatattgatttagtagtccctgaccgaacaaagaccttaaaagaaagggcgattgttccctggaatccaatctcatcgcaatactatccccaaatgttagaacaattctgcaagtcggttggcattgatatggatactcctttcaataagttgcctaaaaagcaacaacaacagattttgtacggtaatggtgaaacgccatttcacttccattatgagaatgactttggtggcattcgggatgtcgatgtgccatttgaaggtgttatcaataatattagccgacgataccgggagactaactcagattttacaagggaacaaatgagaaagtatatgactgagcttccatgtccagtttgtcatggttaccggctaaaccagcgggccttagcagtaaagattgatgggcgaaatatcggtgaagtttccgctttatcaattagtgattcccttgaattctttaagagcatcaaactttctgcacaaaaaaatgaaattgctaagccgattttaaaagaaatcattgatcgattaacctttatgaaaaatgttggtgttgaatatctaactttaagtcgctcagcacgaactctttcagggggagaagctcagcgaattcgattagcaacccaaattggttctaatttatcaggagtaatgtatgtccttgatgagccgtcaattggacttcatcaacgagataatgaccgtttgattgagtcgttaaaggctatgcgtgaccttggtaatacacttgttgttgtagaacatgatgaagatacaatgcgcgcggccgattacattgttgatattggccctggagctggtgaaaatggaggccaagtgatggcagccggaactcctaagcaaattatgcgatcacggaaatccttaactggccaatacttatcagggaaaaaatttattccagtacctcaagagcgtcgaggaggtaacggtaagaaaattactattacaggagcagcagaaaataacttaaaggatattacagttgattttccacttggtgagtttatttgcgtaacgggggtttctggttcagggaagtcaacccttgttaatatgattctcaaaagggtcttggcacaaaaattgaataataattcagcaaaacctggtaagtacaagtcgattagcggggtcgaaaatattgagaaagttatcaatattgatcaatcgccaattggtcgtactccacgaagtaaccctgcaacttatacgggagtctttgatgacatccgtgaattatttgcccaaaccaaccaagctaaaatgcgtggttatactaaggggcgttttagctttaatgttaagggtgggcgctgtgaagcctgccgcggggacggaattattaaaattgaaatgaacttcttgccagatgtttatgtgccatgtgaagtttgtcatggaacacgttataattctgaaacacttgaagttgaatacaagggcaagaatattgctgaggtccttaatatgactgtttcggaagctcttgaattctttagtgcgattccaaaaattaagcgcaaattgcaaactattgaagacgttgggctgggttatgttcaccttggtcaaccagcaactaccctttcaggtggggaagctcaacgaatgaaattagcagctgaacttcaccggcagtctcacggtaagagtttctatattttagatgaaccaactactggattgcacatggatgatatcaagcgcttattagctgtcctgcagcggttagtcgatgcgggaaatactgttttagtgattgaacatgatttagatgttgtgaaatcagcggactggttaattgaccttggccctgaaggaggagctggtggaggtaatgttgtcgctaccggaacaccagagcaagtagcagaagtaaagggaagctacactggtaaatatttaaaagagatgctcgaacgtgatcaaaaatgggcagaagaacgagaagccaagcaaaaaaagtagttgcaatctaattcttctaatggtattctaataaaaattaaagtacacgaaacgagggaaaagaaatgttattttttaataatcagaatcaacaattttcttcctcctcagcctctaacactattaaggctgagtgattttggtgtacccaatcaataggtttatacagactcgggttctctattaatcatttggcgtgaccaaattgcattaatagatgatacccgggtttttattttgcctaatattaagaatggaggaatgatgatgaatcaacaaccaacagatgaactaaaaaggtcgcttggattttggtccgctatttcgattgttgttgggacaattattggatcggggatattctttaaacaaggatctgttcttgatagtgctggtacatctacgcttgcaattgcagcctgggtatttggaggaattattactttaactggtggattaacagtggcggaaattggtgcccaaatgccatatacggggggattatatgtatatatcgaaaacttgtatgggcgccttttaggatttttagctggctggatgcaagtaattgtttatggaccagcaattattgcttcggttgccggattcatgagtattttaatggcaaacttctttggtttaggaacccagtggcgaatacctttagcagtgattacagtgattgccattggcgtaatgaacctttttgaaaataaagttggggcaattttttcgattgttacgactgccggaaaaatgattccaattgcggcaattattatctttggtttgttctgggggcatcaagatgcttttggtcaaacggttaccgaaattcaccaatcaactggtgggtttggggtagcagttttagcaaccttatttggttatgatggttggattttaatcgcaaaccttgggggagaaatgaaaaatccccaaaaattattgccacgagctatcattttagggattactgctgttcttattatttatactttaattactgttgggattcttaagttccttccagttaacactattcatcggctaggtgaaaatgcaactgcatacttagcggtgaaagcttttggcgcaattggaggaaaattgctgtcagccggaattattatttcgatgatggggactttgaacgggaaaatgattactttcccccggattgtatacgcaatggcgcgtcgtcatgatttgccattctcacgctatctcgcatatatcacgccaaagggtaagtcaccagtagtcgcaacgatgtttattatcattcttgcaacggttatgatgttcttctttgaccctgatcacttatcagatttgtgtgtgtttaccgtttattgtttctatcttttagcattctttgggatcttcattttaagatataagaataagggaccgcgcccattcagcacaccgctttaccccttagtgccaattattgcgattgctggtggaatctttgtcctcgtaagtgaagttatgaatgatcctgctggtgtaattctttttattggaatcgtcatcgtaggattaccaatcttatatattgttaaacgaatggatcaacgacggatgcattaatatttaaggctgagtttgacttggccttttttgttgctcaaataagacacacccggcttgatgtgataaaatagttgggtagctgtatgcgaaaagaggaactagtgatggtagataaaaaattaaaagtagtaattattacagggatgagtggtgcggggaaaaccgttgccgttcatagcttagaagatttaggatatttcgtaattgataacatgcttcctggattggcagaacgttttgttgatgtgatagaagattcgagagagtttgataaaatcgccatggtaatggatatgcgttcacgcggattttacgatgaggttttaccaaactttgaaaaactgaaaaaacgggctgatttagatgtgaaactactcttcttagatgctaatgatgtcacgttaatttcacgttataaggaaacaagacgttctcatcctttatctccgcaaggtcgaattcttgatggggtagaattagaacggaagctttcaactgatcttaaaagtcaagcagatatagtaattgataccactaatgtgacaccacgaaatctaaagttaaggcttaataaattattcggacaaggtgaaggcaatgacttttatgttgaagtaatgtcatttgggtttaaatatgggttgccacttgatgcagatatcgtaatggatgttcgtttcctccctaatccattctatattccagaattaaagcacttaacggggaatgatccagctgttcaaaattatgttgtgcagagtccactggctaaagaattttaccagcatttacggtcgctcttagagattgctcttccgggttacattaaggagggaaagagcagcctgaccattgcaattgggtgtacgggcggtcaacaccggtccgtaactattgctaacaaattatctgctgatttaaaagaaaagggatataaagtaaatacttaccatcgcgatattgagaaggcaaagtaaagaggagttttaattatgttgcataaaccaaagattgtagtgattggcggaggaactggtctaccggttgtccttcgtggattgcgcgatcaaaatgttgatgttacggcagtcgtaacagtagctgatgatggtggttcttcaggaattttacgaaactatattaacgtggttccacctggtgatattagaaacggtttagttgcgttatcagaattacctgatctcgaacttgatatttttcaatatcgttttaagagtagtgaccagttctttgccgggcatgcgattggtaatttaattatttctgctttgtctgaaatgaagggtggtatttttaccgctgttcaagagttatcagaaatgatgaagattaatggacatatttatcctgttgctaatgagccgttgactttaaatgctgaatttacagacggtacaaagttaagtggtgaatcggaaataacggctgcccataagcaaattaaacgggtctgggtaacaccttctaaagataatgatgggcatcctgctcgtcctgtgtcagaggttataacagcaataaagaacgcagatcaaattgtccttggccctggaagcttatttactagcatcctgccaaacttgatgatttctgaagtagggcaagctgtttacgaaagtaaggctgaagttgtctatatttgcaatattatgacgcaaaaaggtgaaacggataactttacagatgctgatcatgttcgggtattaaaccatcaccttgggaagaattttattaatacggtcttagtcaatattcaacctgttccagaaaattatcttgattttcaggaatggaatgaaatttctcaaccagttaagcatgatttccaagggctacgagcacagcattgtcgtgtaattagttcaaattttctgcggctaaaagacaatggtgccttccatgatcgcgataaagttgtagcagaattaatgaatcgacttcaccaagttcacgagtagttaggagactgatgctagatgtcatatgcaagcgaagtaaagaaagaattaacgggaattactgttcatcgggataatgcaaaggcagaattgatggcccttattcggatgaacgggtcgattggcattgctgaccaccagttagttttgaatgttcagactgaaaacccggcaattgcgcgacgaatctattcacttttaaaacaattttacggggtagaaagtgaaatcgtggttcgtcgtaaaatgaaattaaaaaagaataaccaatatatagttcgcttacgctatcatgcacaacatgtcttagatgatcttggtattttacaaaattatcaaattaaagaacaagtacctgtagaattacttaaggatgaatggatggtccgttcatatctaagaggtgcgtttttagcggggggatcagtgaataatcctgaaacttctcgctaccacttggagatatactccctttatgaagaacataatgagatcattgctcagatgatgaacaagtttggtttgaatgctcaaacaaccgctcgccgtagtggttttatcgtttacttgaaagaagccgaaaaaattgcggattttatgtcattaattggtgcaactaattcaatgcttcaatttgagaatgttcgaattgtacgagatatgcggaattcagttaaccgattagtaaattgtgaaaatgctaacctgaataagattgcaaatgcgtcaacgcgccaaatcgaaaatattgaatttattgattcacgagtaggtcttaacagcttacctgataagttgcgggaaattgcagaaacgcgattagcccatcaagaggttagtctaaaagaattaggggaattggttcctggtggtccaatttccaagtcgggtgttaaccatcgtttacgtaaattgaatgcttatgctgatgagttgcgtgcatcgcaggttaaacaataaaaaacctttgaggggactgtgacataagttaagttactttcataaaaagcaaatacgcagtacaacaatggcctctaatgtccggcaaaaccgaacgttagaggcctattgttgcttgcggggctcgaaaacgaagtcacaagtgacatctgtctcgctcccctcaaaggttttattttatcttctttaagtgaaatttatttcttatttatactttcgctaattagtgctaattcagctgctgcgcattcttgatctaattcgttccagttagcggtaacgttaaaaacgtttaatttatttactgacattataacatcctccttgaccttatacctttattctctttcatctacattttgtatcatactacaattggtctaaaaaattaaacattataatatcggcatttgaagaatacttttttaaataggtatagttatattgctgaaattaataatgtaatagcaaagttaatcgtttgtcaaagttagataaattgttaaattttggaaatggcattcacgggatagttgttttggattaagggagacttgctttttaaaacaatgaccggtataattggaacgttaattaatttacgtttaatattaaaggaggcaaagtaacatgcgtaaagcacacccatacggcgtacaaggccgtcgcccaatcgcttcaaagtacaagcgagcattaaaagaaaagaagatcgaagctattcgtaagtgggctaaggaaaagccagctgaagaaaagtaattcagtctataaaagctatgcaattcagtgcatagcttttattttttaataacgccgtttgtaaaattaagttagaaaaatagaaaagccatttgtggtagacttttgaatacccctaaacaaaagaaaggaaaccacaaatgacttacacccatcttaccacaaacgagctgacaatcatcgcccattctttcgtgcaaaagcttaaagcgtaccgagtggcccaaatgatcaaccgttgttccgaaaccgtttatcgcgtttatcgttacctggaaaccggtgccttaattgctgattatcaagatcactagcaacgttgtggccgaaaacgtactcagttgtcactggctgaactcacttatatcaacgacaaaattgcccaggggtggacgcctgataccattattgggcgcgctgagcgcccaattagttgtaaccagcgaactctttaccggatgtttgaacgtggccagttcggcttcgatgtccgttccttgccgatgcgaggtaagcggcacccgaatggctatgtcgagcgccgcgggaaggttggccaattggggcgaagtattcacgagcgtgccaaggactttccgcactatgccactgaatttgggcaccttgaagctgataccgtccaaggcaaaaagcaccaaggggcggtaatgaccctgaccgaacgctaatcgaaggtcgaaattgtactcaatgtgcacaaaaagacggctgatgcgattaaccaacacttaagtcagcggcttcggaaattctcgtggcacttcttcaaatcgattacctttgacaacggaaaagaattcgccggctggcgcgagattgccaatcaatttgaccttcacacttactttgccgaggttggtgctcccaatcaacgagggctgaacgaaaacaacaacggtcttttacgccgggatggcttaacgaaacagctagatttccgcaaccttcctgatgaattggtaacccaactgatgagtaagcgaaataacctgccccgtaaatcactaggctatcgaactccatatgaagtattcatgtcttacgtcactgatgagcaactattttctttctaacttaaattgacatttcgggatttaatggtggattatagaatgaagttagccacccagttggtggtaaataaaaaacgccattcggcgtgacatcaggtatcatattaagtgaaccaaacctatatgaaaggatgtccgtcaaatgacgcacttaaatgataccatgtctactagtttattgactactcataaaaagaatgctcatcttactaaagaagaacgtgtgatgattgcgactttaaagtcgcaaggactttccaatcgcgcaattggtcgccaattaggagttaatcatcaaacaattaataacgagctcaaccgtggtacggtccgccaacttcgtcgtcaaaaatctaatggtaagatttacgaatattcttactacatctatagttatgaagctggtcaggccacatatcttgaacatcaccgccattctggtcgtcgtcgcttatattattcttcaaagcaatttttacgattagctgatcagctaatgcttggtgagtttgacgaccaccattactccccacaagcggttatttataaggctcgagatttaatgaatgatggcaccctgatcccaaagtcggttgtaactttatatcaatggattaatgagggtgtgcttcgtacgtccaatttagacctctttgaaaagcctaaacgtaagcatcatcgaactcatccgcaagctaaaaggtgcttaggtcctaatattgctcaacgacctcaaactgcggaccaacggtccgaaattggccattgggaactagatacagttcagggacagaaaaacggtaatgacagtgttgtactagtaatgactgatcgcctttcacgagttaatatcacgagtaaaattgctggtaaaactgcgcatgcagtaaatcagttctttataaatttacgccagaaaatgggcacagatgcttactatcgcatctttaagacaataacctctgacaacggttcagaatttagtgagttaacacaagttcacgatcatgttttctatgctgatccgtattccccttgggaacgtggatccaatgagatcaataaccggtttctccgcaaggagattaccaaaggtgaagctataaataactatagtagtgctcagatcatagcgactaatgattggatgaatcactatccacgagctatgtttaatggacattcgtcaatggatatctatcgtaaggccttctaccaagagatatcacagctccatcaaccaataatcaattggtcagtattatttatttgagtccagtggctaacttattcttgaaatttaggttcgggatttaattaaatggtcaagaatattttgcaaaaaaagattaaataatagttaaaacatttgaccttttttgaccaatcgagtatagtattattatccgttagcatataagactaacgagtgctaatttattaaggaggccatattatgaatttagtacctactgtcattgagcaatcatctcgtggtgaacgtgcttatgacatctactcacggcttctgaaggaccgtatcattatgctctctggtccaattgaagacgaaatggcaaattcaattgttgcgcaacttttattccttgatgcgcaagactcaactaaagatatttatttatacattaattcacctggtggagttgttacctcaggaatggcaatttatgacaccatgaactttattaaggctgatgttcaaactattgtaatcggaatggctgcttcgatggccagtgtactagtatcatctggtgctaagggtaagcgttttggattaccacactcacaagttttgattcatcaaccatctggtggagctcaaggtcaacagactgaaatcgaaattgctgctactgaaattttgaagacacggaagatgcttaacggaatccttgctaagaattctggtcaacctatcgagaagattcaggctgatactgaacgtgatcattacttgacagcacaagaagcagtagattacggcttacttgatggtgtaatggaaaataattcaaaattaaagtaaagtgataattaaaaagatctccaattattcgattaatttcgaatgacggagatcttttttattatcaaaacgtgcgtggaaattaacagccttgtggcgactgtaatatcttaaaaatgaaaaaaggctgtcgaaaaaattcaacagccttataaaaatgcgccccccgagagtcgaactcggatctcgagaaccggaatctcacgtgcgatccattacactaagggcgcgtcaacaaatattatactatcttaaataagaatgaattgcaagcattatttgaaaattttaattaaaataacgcttacatcagaaaaatgttgtgattgaatagacaatttttttgaagatggtatcataagtatcgtaggagttgtattattgcttagaccttaccactgcgtcacttacaatggttgagagttgcgatgctgatgtaatgtgataaactaagcaagtacactaattatgttttttcctaaaggaggaatttgcagtatgactgtaaaaattggtattaacggttttggccgtattggtcgcttagcatttcgtcggattcacgaacttaacacaaatgatattgaagttgttgcaatcaacgatttgactactccttctatgttggcttacttacttaagtatgactcaactcatggtaagttcccaggtgaagttacatctactgatactggtattgttgttgatggtaaggaataccctgtatacgctgaacgcgatgctcgtaacattccttgggtaaagaacgatggtgttgactttgttcttgaatgtactggtttctacacttctgctgaaaagtcacaagcacacattgacgctggtgcaaagcgtgtattgatttcagcacctgctggtaacatcccaactgttgttcctggtgttaaccttgatactttgactaaggatgacattatcgtatcagctggttcatgtactactagctgcttggcaccaatggctaaggtcttaaatgacgaatttggtgttaaggttggtactatgactactatccacgcatttacttctactcaagctatccttgatggtcctcgtggtaagaagatgcgtaacaaccgtactgcaagtgtaaacactattcctcactcaagtggtgctgctaaggctattggtttagttattcctgaattaaacggtaagctttcaggtcacgcacaacgtgttggtgttgttgatggttcattaactgaacttgtttcaattttggacaagaaggttactgttgaccaaatcaacgatgctatgaagaaggctactaacccagcattcggttacactgaagatgaaattgtttcaactgatattatcggttcaacatacggttcagtattcgatccttcccaaactgaaattatggaaggtgacgatggttcacaattagttaagactgttgcttggtacgacaacgaatacggtttcactagcaacatgatccggactttacttcactttgctactctttaatttgaagtaaaattaaactaatttgattaaggtgggaggaggactactccgcccgcctttttttatcaagagaagaggagacataatacaatggctaaattaactgttgaagaccttcctttagaaggcaagaaagtattaatgcgtgttgactttaatgttccaattaaagacggcgttgttggtgacgacaatcgaattgttgcagctttaccaacaattaaatatgttattgaccatggtggtcgagcaatcttattctcacaccttggccgaattaaaaaagaagaagataagcctggactttcacttcgtccagttgcagaacgtctttctaacttactaaacaagccagtaacatttgttccagttactgaaggtaagcaattagaagatgctatcgacaacatgaagaatggtgatgttttacttgtccaaaacacccgttacgaagacgttaaggatggcgaatatgtaaagcgtgaatctggtaatgatcctgaattaggtaagtactgggcttctcttggtgatgtatttgtaaatgatgcttttggtacagctcaccgtaagcacgcttctaatgttggtattgctactaacatgccaggcaaagcagcagctggttacttgatggaaaaggaaatcaagttcttaggtgatgcagtagataatcctgaacgtccatttgttgccattcttggtggtgcaaaggtttctgataagattggtgttattgataaccttcttgacaaggcagacaagattattatcggtggtggaatggcttataccttctacgctgctaagggaatcaaggttggtaactcacttgttgaaaaagacaagattgacgttgctaagcaaatcttagacaaagctggcgataagcttgtattgccaattgataatgtagtagctgataagttcaacaatgatgctgatacaaaggttgttgaaggtgatattgacgacggttggatggctcttgatattggtcctaagtctgttgaagagttcaagaacgtattaaaagatgccaagactgttgtttggaatggaccaatgggtgtatttgaaatgccaaactttgctaagggtacgcttgaaattggtaaattccttggtacattaacagatgctacaacaattgttggtggaggagactcaactgctgcagttaaggaattgggtgttgctgataagcttactcacatttcaactggtggtggtgcatcattaacttaccttgaaggtaaagaattgcctggaattgccgcaatttctgacaaataattaatgtttaactactatttataattcttatataagaggctgagaaaacttttgcttttctcagcctcttaccgtatcttggtattaacaataaaatggtagataggagggtcaaataatgagagtaccgattattgctggcaattggaaaatgcataaggatgtacaagaagctgtctcttttatcgaaaaaataaaaaatcagcttccacctgccgaccaacttgaaacagcaattgctgctcctactctttgtttggtaccaatggttaaagcggctaaagaatctccgttaaaaataatggcagaaaactgctattataagaatgaaggagcctatactggtgaaacaagtccatatgctttataccaagcaggaatccatcatgtaattttaggccattctgaacgccgaacttactttaatgaaactgatgaattaattaataaaaaagtgaaagcagcattagtaaacgggttatgtccgattgtttgttgtgatgatactatgcgtcgacgagttgctggaaagaaagttcattgggtggtgagccgaattctcgctgatcttcatggattgaccaatgacgaaatttgtcatgttacggttgcttatgaacctagttgggcgattggaacaggcgagagtgctgatccagaacaagcggcggaaggttgttaccttattcgccagacgattagtgatatgtatggcgatgaagttgcaaataatgttcgaattctctatggaggaagtgtgacaacatctaatatcaatgcactaatggcaaaaaatgatattgatggtgttttagtcggagcggcgagcttaaatccagaaacatttttacaattagttcaccattaggcggttaaatgcttgtttttaattgtgtaaaataatacaatgttaagtggaattgctttccaaataaatgacagaggagagattcatcaaatgtcactcattacagatatttatgcacgtgaagtccttgattcgcgtggtaacccaacagttgaagcagaagtttacacagaagccggtggtgtaggccgcggtatcgttccttcaggtgcttcaactggtgaacacgaagctgttgaattacgtgacggcgacaagaaccgttttggcggtaagggtgttttaaaggctgtttcaaacgtaaacaacattattgctaaggaaatcgtagggatggaagttactgaccaaatcgctatcgataaggcaatgattaagttagacggtactccaaacaagggtaagttaggtgctaacgctattttagctgtttcattagctgctgctcgggctgctgctgacgaattacaagtacctctttacaactaccttggtggtttcaacgctcatgtattgccaacaccaatgatgaacgttattaacggtggtgctcactcagataacaaggttgacttccaagaattcatgattatgccagttggtgcaccaactgtacgtgaagctattcgttggggttcagaaactttccacgctttgaagaaggaattggaagctgctggtaaagtaacctctgttggtgacgaaggtggatttgctcctgactttgctaacaacgaagaaccattcgaatacttaatcaaggctattgaagatgctggttacaagccaggtaaggacattgccattgcctttgacgttgccgcttcagaattatggaacgacgaagacaagaagtacaagcttcgttggtcaactggtgaagaatacaccactgaagaatggattaactacttatccggtattattgaaaagtacccagtagtatctgttgaagacccaattgacgaaaacaactgggatgattgggtaactattactgataagttaggcaagaaggttcaacttgttggtgatgacttctttgtaactaacactgattacttgaagaagggtatccaaatgggtgctgctaactcaatcttaatcaagcttaaccaaattggtactttaactgaaactgttgaagctatcgaaatggctaaggaagctggttacactgccatcgtttcacaccgttctggtgaaactgaagacactactattgctgacttggttgttgctacaaacgccggacaaatcaagactggttctatgagccggactgaccgtcttgctaagtacaaccaattaatgcggattgaagatcaacttggtgatgttgctcaatacaagggtatccactcattctacaacttgagtcaacaagctcgtcaagacatcgaaaatcgttaattttaagcattagttaaaaatcaaaaggactatggagaaaattccatagttctttttagttacaaattatttaattaagattaaaaacgattacatcatttatattaaaaaataatgagaaagaagcgttggaatttagtataaaatataatataatctttaagagttaaatacaatgaaaggataatgatacacatgaaaaaatcggcaccagaacttaatcgttcgatgactgctggtcagatggaaatgatttcccttggtggagcgattggtgttggactgtttatgggatcaacatctacaatcaagtggaccgggccatctgttatcctcgcatatacgtttgtcggcttaattctatatattgttatgagagcgttaggagagatgatttacattaatcctggaacaggttcttttgcggattatgcaactgaatatgttcatccagtagctggataccttgctaaatgggctaacgtatttgagtatattgttgtaggaatgtctgaagtagtagcagcaactgaataccttaaatattggtggccacaccttcatacttgggtagctggaattgttattattattttcttggtcctcgctaatttagcgagtgcaaaagcatatgggtcgcttgaattttggtttgcgatgatcaaagttattactattatctttatgatcttacttggatttatgattatcttctttggctttggtaatggcggtcatccaaccggtttcagcaatctttggtctcatggtggatttttcactggtggctggagtggtttcttcttctcaatgtcaattatcgttggatcttatgaaggaatcgaattgctaggaatttctgccggggaagtagcaaatccgcaaaaagcaattgttaaatctgttaagtctgttttattccggattttaattttctacgttggcgcaatttttgtaattgtaacaatttatccttggaatgaattaagcagtgttggatcaccatttgtatctacttttgctaaggtcggaattacagctgcagcatcaatcattaactttgtggttttaaccgctgcattatcaggtgctaattcgggtatttacagttcaagtcggatgctgtttaagctatctcatgaaggggatgctcctaagatttttggtcgtctttcaaaacggatcgttcccgatgctgctatccttggtatttccggtggtattttgattggctttattattgatatgatttcggcaacttatagccattcaactgctgatatgttcgtggttgtcttcagttcttctgttttacccggaatgattccatggtttgtaattttactggcagaattacgtttccgtcgtaataataaagacttgatggttgatcatccattcaaattaccactatatccattttcaaattattttgcatttctcatgttgattgtgatcgttatctttatgtttattaatcctgacacacggatttcggttattgttggtgctgcagtattgattctagcagtcactgtataccttgttcggcatggttttaaaaacgaaaaagcataagataaataagaagctaggaaaaaatccctggcttctattttatttttaaattaatttcgtctcactaagctcatgtagtacaatggcatgtagacttttaataaattggagaagaacaatggagagtagaaaagaggtatttcatcgctataatcagttcaatcaactaattcgggcgatcattattggaatattgactggtttagtagttagtgtatttagactcataattcaacactttttacaattagtaacagcaagttttgcatattttcattctcatccattatggctaataccatggacaattggatcaattattttagcattattattaggatggttagctcaatcctatcctgatataaaagggtcggggattccacaggttgagggacagttgactaaccaatttgatgaaaaatggtggccagtgttatggcgaaaatttctcggcggagttttcgccattggatctggattatatctcggacgtgaaggaccatcaattcaacttggggcaacaattgggcaaggagtagaggaaaaggccaaagtagggcaccttaatcgccaaatagggatcgcaagtggagcagcagcaggattatctgcagcctttaatgcgccaatcgctgcgactatctttattttggaagaagtgtatcataatttttcaccggtaatttggttggcaacatttgtgagttcgctttgttctaatatggtttcgatgcagttttttggcttacgaccggttttgaatgttccttataatcatatgcttcctaataatctttattggcatttgatcgcgcttggtattttattaggtatcttagggcgtctttaccaaattgttattttgcatttgaatggttggacggcacggattcctaaactatctcctattgcttatccaattattccgtttttgctggttattcctatcgcctggtattttccaatcacgttgggcggggaaatgaattaattattattttacgttccttgccattttctttagcgctttttgtggggctttttgtccttcgctttgtattttcaatgattagttatggttcgcaattaccgggtgggatatttttgccaattttaactcttggcgctattttaggcgcagtctattgtgcgttaatggtccgtttgggattaatgccagttcgatatttacctaattttattatctatggaatggcaggttattttgcatgtattagtaaggcgccatttactgctattttattaattactgaaatggttggctcacttgcgcacttaatgccattagccttggtagcagtagtagcttatcttgttgtggatgcgttacacggtgaaccagtatatacagcaatgtttaacgcctttattggaaataatccgcaaccagcacgccataaagaggatgttacgatgtcgattaccatttatgctggcgcccagttggatggttgtaaaattaaagattttccatggccaactgattgtattgtgatggttgtctatcggggagaagaaaagatcattccgaatggtcaaacaaagctgcaagctggcgatacgttaattttgcgggctaattcagcaactactagacaagtttaccatgagataagtcgggctgcgcattatgcacaaggatagcaatagaataataaatatgatatgataattaagataaaagcgtgaaagtattaggaggaaaaatccttgtataacacattaatgactttattcttaattgattgcgttgtattaattgcttgtgtaatgatgcagccagcaaaaaacgataatgatgcaatgtcagctttgacaggtggtgcgggtgacttattctcacgtcgtaaagcgcggggatttgaagctgttatgcagattgttacaacaatttgtggagcactcttctttattctggcattagcgatgatttacgtttcgtcacattaaatttaaagtgcctcctgaaattattgtgattccagggggcttttttgacgctacggttggagtgcaggggatgatgtagtgataacgtatactggtgagtcttttttctttcccatagtggacggcatggagttattttgcttcatgcatatacaggaaatacgaatgatgttcgaatgctgggacgtcagcttaactggcaaggatatacggttttcgcaccgcttttgcatggtcatggtggtgatccgcaaaaggtgctggaaagcaatggcccagatgattggtgggatgatacccggatggcaatttttcgtttacgagatgccggagttgatcaaattgcaatttttgggttatcgcttggtggtttacttgcaacaagagctcttgagaatgatccgcaattattaggtggtggtgtttttgcatccccaattaccacctggggacaatcgaatgttccggaatacttccctaaaattgcggcaaagtattatcgtcagcaaaaaatcaacccattaattactaaggaaaaggttgctaaattgactgaacgactcccccaacaactagcacaaattcaaacaatggcgcatcaaatttgtgaccaattagatcagattcatcagccattctttattgcacaaggaggcacagatgaaatgattgatccagcgtctggactgcaattaaaaacaaaattacaggagaatggggttgcagttgattaccattactacccaaccgctactcacttattaacagttaataccgctcatcgtcaactatttgccgatgtagaaaaatatttacaaaatttattcgaggtgccttctaatgacaacaaataatttaaaagaaaaaatattaacacatttaacagataatgcaggtgtgagttactcagcagaaaaacttgctcatcaattagggatggatgatgctgagcagtttacaccgatcgttcaatctcttgctcaattggaaagagagaaaaaggttcaagtaactgatcatggtgaattcgaagcagttattaaacagcaaccacttattggaactttccacggaaacgataaggggttcggttttgtagactatgaccctgatcttccagacatgtatattaatcctgatcatactttgcatgcattaaatggggaccagatagaagttaaagtattacgtccagcaaaagcaggtagtgatcagggtccagaaggtcaagtaacccggattgttgaacataaatatgaaaatgtagttggtgaatttaagcaagcgactatcggcgatgattacattggtgaaattttgcttaaagataagaaattatcgcagtatcatttctatgtaacggacaagggattaaaaccacttgacggccaagtagtaacagctactgttgagacttatcctagtgatgaggcaccggaagtaatgacgggtgccgttactgaagtgattggtgataaggatgagccgggtattgatattatgtcagtaatctatgctcacgacgtccctcatgaattccctaaagaagtgatggaacaagctaataagattccgcttcatgttctcccagaagaaaaaaagggtcgggtggatattactgaccaaccgcttgttaccattgatgcaattgaatcaaaagacctggatgatgcggtggtagcttggaagatggataatgggcactaccaccttggggttcatattgcggatgttactcactatgtaaagccaggtacaccgcttgatcaagaagcatttaagcgtggtacatctgtttatctaactgatcgggtagttccaatgcttcctaagcggctttctaatggaatttgctctttaaatcctaatgaagaacgtcttgctatgagttgcgaaatggaaattgatgagcaagggaaaattgttaatcaccgaatcttccaaagtgttatgaaatcacatgcccgaatgacttataaagcagttaataagattctggagtcgcatgatgctaaaacgatgaggcaatatgaagatctcgttccaatgtttgaaacaatgggggagattcacaaattactgcttaagaatcggaaaaaacgtggtgctattgactttgaagctcctgaagcaaagattattgtggatgaaaagggtcacccaactgatattcaactacgagatcggggactttctgaacggatgattgaatcctttatgttagctgctaatgaaacagttgctgaacactactttaaggaacacgttccattcctttaccggatccatgaaacaccagatagtgaacgtattaaatcatttgtggactttttagctgtgtttggaattgaggttcatggtgatattaagaatgttaaaccagggatgcttcaaaaagtattgaaggatgtggctggtactcctgaagagcaaatggttcaagtgatgatgttacgtagtatgcaacaagctaaatactcggatgaagagctaggtcactttggcttaggcgctaaatactacactcactttacttcaccaattcggcgataccctgatgatacggttcaccgtttgattaagtggtacgaagaacatggtaaaaacgaaccagctaaggaccattggcgtgataagcttccagaaattgctgaacatacttcggttaccgaacggcggggaattgataccgaacgtgatgttgatagtatgaagaaagccgaatacatggaagaccatgttggcgaaacctttgatgccgtcgtaagttcagtgatgaagtttggtttgttcgtcgaattgccaaatacagttgaagggttagttcatattagcgtcatgaatgatgattattatgaatattcagaaaaacacatggccttaattggacgaaactctcatcgaattttccaaatgggacaacctattaaggttaagttagttcgggcagataaagatcttcgtgaagttgattttgaaattgttaaccctgaagaagcaccaaagacaaagattcgggtcccacgtaatgatgaatatcggggtcgaggtcgtggccgcaaaggacgtgccaataataattcccgtcatgagaacactagcagtaatcattaccgtaatactcaaggaaaatggcgtcgaactcaccaagaaaatggtcgtcaaaataatcgtcaaataaatcggggacaaactcgtcaccacaataattcacgtgatcatgaaggcgtttgtcgccaccattaagagcggggagggatattatggcaaaaaaatcccatcaagaaaataatgacaatttaattgcacaaaataaaaaggcacgtcatgattattttgtcacggatactgttgaagcaggattagttttaacggggacggagataaaatctgttcgtgctcaccgggtgaatttgaaagatggatttgcccaagttcgtaacggtgaagcttggttaatgaatgtgcatattagtgagtatgataatgggacttacttcaatcaagatccattaagaaatcgcaagttgctattgcacaaaaaggaaatcaataagcttgtaggagctttacaggataagggagttacgcttattcccttgaaaatgtatattaaacacggctatgcaaaagttttattaggactagccaaaggtaaacaccagtacgataaacgtgaagcaattaagcgtcgtgaacaaaaccgtgaaattgaacgagttatgaaacattattaaaacgaaaagcctaggtgaaaatcacaaattttcacctaggcttttcactttaaaatctatttgtttctacgttctttacagtttaagtttaactgattgctaattgaaaatgacatgctggtattaagattaggggaacgcttcattaatcgtgctaataaaggttcttgttcacttcgtcgagcccaatggttaagaatactagcgattagaattgctaaaggttcatcttcttttttatttatctttaattcatgacaatatccgcttgatagtttaacgggttgaattgaaaaaactaagtgactaccggaaaaaacacggtaacggcttgttaatggtgaaccaacaacgatccagttaataccgcgtatataaataacctgttgaacaaatccaagacctttcccaattgttccaacgcgttgtcgattaacatataatgcgaatttgggtaacagtccaagagttaattgctttacttcagctaataaggctccatcaattgcatacaatgatagggcatcgtacctcattccccacttaccgacaagaagatagcacgatttaccattcttatcgcgaatgacggtcgttccatgtaaatcacttgaacgatcgcgaatatataattgtcgcactttgccaccaccattctttgataatctaccttttattttaccagcttcttagcaaatttggtgaagaaacttctaagttaaaaaacgcttccaatttatcccatgatgatgtttaattatgctaaaataataggcgaggtgctaataatcgtgaaacaattaattcataacgactggtgggaagttttaaagccccagtttgaaagtgcatattatgcgcaattgcataatttcctaaaagaagaatatacccatcaaacgatctatccagaaatgcatcatattttcgaagcatttgaatggactccttttagtaaggttaaagttgttatccttggtcaagatccttatcatggaccaaaccaagctcatgggtgtagtttttcagtactgcctggggtgccggtcccgccttcattacagaatatttacaaagaattgcaaagtgatttaggttgtataccggtaaatcacggctatttaaagaagtgggctgatcaaggcgtcctgttattaaattcggttttgacagtgcgagcagggcaagcatattctcaccgtggacatggctgggaacaattaacagatgcagcgattcatgctttatctgaacgtcctaaaccagttgtgttcatcttatggggacgggctgctcgaaataagaaacagttaattaatacgaagacaaatatcgttcttgaatcagctcacccgagtccattatctgctaaccgtggattctttgggtctcgaccattttctaaaacaaacgaagcacttcaggcaatgggagaacagccaattgattggcaactgcctgccaaaccaaattatcgttaaagatgtgattgttagtcacaactttaaaatgtttagtgaccataaggaggtacttgcattatggaattatttgatgagattgctgcaaagattaagggacaaaacaagaccattgtttttcctgaaggtgaagataagcggattttaggagctgctgtccgtttaaagaaagataatttagtagagccaattttacttggtgatgaagaagcgattaaagaagttgcaagtaaaaatggttttgatcttgctggccttcaaattatcgatccagcaacttatccagaagacgataagcaagcaatgtttgactcattaatgaaacggcgtaaaggaaagaatacccctgaagaaattcaaaagatgcttgaagatgtgagctactttggaacaatgcttgtttatatgggaaaggctgatggaatggtttctggtgctgttcattcaactggggcaactgttcggcctgcattacaaatcattaagactaagcctggtgcccatcgaattagtggagctttcctcatgattaaaggcgatcaacgttatatctttgctgattgtgcgattaatattgaattggatgccccaacaatggccgaagtggcaattcaaagtgcggaaacagcacgcttatttgaaattgatcctaaggttgcgcttcttagtttttcaactaagggttctgctaagggtgaaatggttaccaaggttgcggatgctgctaagctagttcatgaattagatcctgatttaccagctgatggtgagttacaatttgatgctgctgttgtcccatcagtaggtgaacttaaagcccctgattcaaaagttgctggtcatgctaatgtctttattttcccaagtctggaagcagggaatattggctacaagattgcacaacgatttggcggttttacagcagttggtcctatccttcaaggacttaacgcaccgattgcagatctttcacggggatgcagtgaggatgatgcttataaggttgcaatgattaccgcagcacaagcattgtaaatattgatgaaaaggaagtgggactaaaaactcgcaagcgagtttagtcccacttcctttgctttttaaacatgagatgggtacaataaggctagtattttaaacttggagagagtactatggagagcttaacgttaacgaatcgtgacgcaacaattgcccttggaaagaaaattggtcagcaattagttgccggggatgtgctagtcttagacggtgatttaggagcaggcaagactacttttaccaagggattggctgcagggttagaaattcctgatatcattaaaagtcctacttttacaattattcatgaataccaagatggccgtctccctttataccatatggatgcatatcgcttagaaaatgggggagcagaagacctcggacttgaagaatactttgatggtgatggagtttcagttgttgaatgggctgaatttgttgaagatgaattgccagctgactttttagctattcacttcaagcgaacaggtgatgataatactcgtattctggaatttgaaccccatggacagcattttgaccaaattgtaaaaagcgtggtgaaacaatggcagacgacatttcgataaagttagcaacgagtgaggatgccggggctgttttacaatttctacgggcaactgcaactgaaagtgacgcggtattagttccgcatttaaatgagattagtgaaaagacagaagcaaaaaatatcgatttaataaatcaatttgatgattgtgttattttacttgcgatgctcggcgaagagattgtggggatggttactgtaatggtattagatcatcaaccgacaaccggtgaattaggagtcgtggtacggaaaaagtattggcgaaacggaatcggtcgcttattagttgatgaagcagagtattggtttaatacttatagtagtttagaaaatttgatcctgacagtttttgaggataatattccggcaattaatctttatcagcaattacactttgttacaatagaaaaaacggttgagcagggtcgtaatgtcctgcaaatgcaatacgataataaaaaagaggaaacaatggaaaagtaagccattatttcccctttcttgtgcgcccggcatgggtattagctaggtggtgaaagtccgctatgggccgtagtagtcggaaccatgagctgaggacaagggtgtccaccgtgaggtggaatttgaaggaagtctaaggcaaagtactgcatcgatgaacaagaagtagctataaggctgaaattaactggataaggctgctagacaagttgaagtccaatactactcgaagttggtctcagtaaagctaacgatgacatggtacgaaagctaatattcttacccggggagatctggcctacacgtttccgacaagaggaataagtttaatttccacagaaacaagcggtgcagtgatgcagtgttgagtaagccagaagtcagccgaggtcatagtagtttgaataatcagatgaaggactgaacgacaataacttgtaacttatatcggagatgtaatcaggtgcgacaatcgcagaaaacagaacaacaagctgaccgcttgtcgaggataggtttggaaaaccgaaagtacacaagggcgcgtagtaccggttatggtgaaggtaaaggtatgagtgtcactatccaagacctggtcttagatcgcaataaccttaatcaggcttatttgcgagttaagagaaataaaggagcagcaggcgttgacgatatgacagtcaatgaccttctgccatatctcagagaaaataagacggaactgatcgctagtttgcgtgagggcaagtataaaccagctccagtcaaacgggtagaaattccgaagcctaatggtggagtaagaagacttggaataccaacggtggtggaccgaatggttcaacaagctgtagcccaaattcttacgcctatctttgagcgtgttttctctgataatagttttggcttccgtccccaccgtggggcccatgacgctattgcaaaagtagtagatctttataatcaaggctatcgaagagttgtcgacttagacctaaaagcctattttgataacgttaatcatgacttgatgattaagtatctccaacaatatattgatgacccatggacactaagattcattcgtaagtttctaactagcggagtcttagaccatgggcttttcgctaagagtgaaaaaggaaccccacaaggagggccattgtcaccactactggcgaacatctacctaaatgagttggacaaagagttgactagacgtggtcaccactttgtgcgctatgcggatgattgtaacatctatgttaaaagtcaacgagccggagaacgagtaatgcgaagcattacccagtttctagaaaagcgcttgaaagttaaagtgaacccagataaaaccaaagtcggtagcccgctacggttgaagtttcttggcttttcgctgggtgtagaccacaatggggcctacgcccgtccagctaaacaatcgcaacaacgagtaaagaaagcactgaagttattaactaaacgtaatcgtggaatatctctgacaagaatgtttgaagaaattcatcgaaaaatgcgtggttggcttcagtactactcaattgggaaactaactaactttattcaacgccttgacaagtggttgagggtccgaataaggcagtatatttggaagcaatggaaaaagtttaaaactaaggtaactaacttacagaagttggggctgtcccagcatgatgcatatgtcttcgctagtacccgcaagggctactggcgaactgcacatagtaagaccttgagctattctctaactaatagaaaactggaacaactcggacttatgaatatgtccaagacgctccagtcaattcaatgtgattaagttgtcgaaccgttgtatacggaaccgtacgtacggtggtgtgagaggtcgataatcgaactaatcaattatctcctactcgattgtacatatgtttattttttatgtaggacttgcataatgtttcgccagaaggatccctttgtttgctgtttactaacgtcttgtgttacctctacacatccgaggtatttattttgatcatcacgtaaggcgtaaaaagcaatatttacaggttgaccatgatgcttgatcataatgctaattgaatcacggtctccggtatgcatatcatgaagtacttgcttaacatggccttgactatgcccgggatgaacctcaagcacatgtttacctaagtctgcatccgttcgcttgaataaacgatgccgattagctgatgaccagcgaatgatatcattttcatcaatgaaatcgaattctacggggatggtttcaaaaatagtattaagttgttcaatacttagttttccacctttaagattaatatctgtcatgattatctcctttagccgattaaattaataaagggctgaatctgttgtggggtaaaatgcttgctttgataaagcagaatgttagcgcaagcctgggcatcatcaagagcattatggtggtgatgaaggtcaatatttaacgcgtcacaaacagtattaagtttataatttgttaatcctggaatcaactggcggcttgaagcaacggtatcgagcgtctggtaggcggggacttcgatattgtaatgttctaacgtattccttaaaacgctattatcaaatcgattattatgggcaataactaatttatcaggagtgtagaattggttgatatgttcccatacttctggaaaatcaggcgcattttggacgtcacgttcatgaataccgtggatctgtgtattacgccaaaagaatttagtatgaggattaattagggtgtaaaattcgtcggcaatttgtccattccgaacgattgtgagtgcgagcgaacatgcactgtaacgcttaccattagcagtttcaaagtccattgctataaaattcatcatacatcctccttgcaaaagtcgataattttattttacaatcaactaatcatttttcaaaacttttacttttgaaaaatgatacaatagctcttgaaagtaaatataaaaaaggaagaaatagagaatggctaatttgatgaacgaatttcctgatattgaaattaaacaagatgaaccattaatgaattacacctatactaaaacaggaggtccagctgactggttggcttttcccgaaacgattgaccaggtaaaaaaattggttgattatgttcgtgagcataaaatgggcttaacggttttaggaaacgccagtaatttgattgttggcgatggcggtatagatgatttaacaattattcttacgcggcttaataaaattgaagttcatgataataaggtaacggcacaggcaggagcatcttatattgcaacaaccgaggcagcccgtgatagtgaacttactggattagaatttgctgctggtattccgggcagtattggtggggctgtcttcatgaatgccggtgcatatggtggtgaaactaaaaatgttgtttctgaggctaccgtaatgcttcccgatggaacgatcaaacactttactaatgaagaattggactttggttatcggcatagcagtattcaagataataatggcgtcgtgttagatgctacgtttgctttggaaccgggtaagtatgatgatatcaaagcaaggatggacgacctaaatgaacggcgagaggctaagcagccattagatctcccatcttgtggaagtgtctttaaacggccagaaggatattatgccggaaagttgattcatgatgctggattgcaaggatatacttcaggtggagcgcaggtttcgactaagcatgccggctttatcgttaatattgaccatggaaccgcagcagactacgtaaatgttatccatcatgtccaaaagacagttaaagaaaaatttggtgttgatcttgaaaccgaagtaaggattatcggccggcaagattaaaaagataaagtgtaagtttattaaaagattattaataagcttgcacttttattattttaaagatagtgaagtgatgaatgaatttaacttaatagttaggtgccgttaaaaagggaaaaaataatttaattgatcttattatttgctaattatgaaaaaatctcacaaattgctcattgaaaaattattattatggatgaaaagcgattccaaaggattttgaagtataccgattcactgactgataaaaataactttgtaatcactttcaaaatatgataggatatttaagtctcatttttgaaaaaattcacaaagtaaggagtatatttatgagcaataatgtagttgttttaggaagtattaacgttgatactacttatcacgttgatcgcttccctcaacctggtgaaaccatttcagcagtaagtaagagttctgctcctggtggtaagggtgccaatcaagcagttgcagcagcccgctctggtgccaagacggcttttattggggcagttggttctgataaagaaggagcttacatgcttgaatcattggctgatgatcatattgatacacgccatatcatgactgataagttacatggcactggtagtgctgcgattactttagatgctaatggtcaaaatgacattatggtatatggcggtgctaatcaagcaatgaccactgatgttcttgcaggtattgatgatgttttagaagatgctgactttttaattagtcaatttgaaacaccacaagaagtggctttagatgcatttaagcaagctaaaaaatacggtgttactactcttttaaatccagcaccagctcatgagattttaccagagttattaaaatatacagatgttattacgcctaatgaaagtgaatgcgccttattaacaggtattgaaattactgatgaagaatcaatgttaaagagtgctgattacttccgtgaacggggagttaagcaccttttgattactttaggctcaaaaggagtattttactctacacctacagctcatggattagttccagcatttaaggttaaggcagttgatactacagcagctggtgatacattccttggtgcattaagttcacaattagaaaaggacttatcaaatgttgacaaggcacttgtctacgcacaacgagcatctagtttgactgtccaacaaatgggagcaatgccttctattccaaaccatgatgcggttataaaagcattagcagaaaattaaggagtactatcatgaagaaaacagggattattaattcagaagtttcagctgtcgtggctaatatgggacatatggattggttatcaattggtgatgccggaatgcccgttccatttggtactaagaagattgatttggctgttgataaggaattgccaagctttatggacgtattgaataatgttcttaaggaaatgaaggttcaaaagatttacttagctgaagaaatcaaggatcaaaatccagaacaacttgaaaatattaagaaggcattaccagatgttgagattgcatttatgcctcatagtgagcttaagaagagtcttgctaagacgcatgcctttattcggacaggggaaatgacgccatactcaaacattatccttgaatcaggcgtaacattttaatattaggggttagttttttatggaaaatgaagtaaaaaaagataagggacaaagttgggttcaactgtcagacggttatttaagtcggacaccaatgttccaatttgttattttatgtttaatcttcccattatggggagcagcggccagtcttaatgatattttgattacacaatttaagacggttttcaccttaaatgatactgcaacggcctttgttcaaagtgccttttacggtggttatttcttaatggcaattccggcttcaattcttattaagaagacatcatataagttagcaattcttattgggctattattttatattattggttgtggaatgtttttcccagcttcacatgttgctacttatagtatgtttttagttgctatttttgctattgctattggtttgagttttcttgaaactagttgtgatacgtatgcaacgatgtttggaccaaaagaaactgctaacaaacggttaaacgttgctaatgttttgattcctcttggtgatatcatgggaatcgttcttggtaagtaccttattttcggtgaaggtggaaacattgccgacaaggttgctaagatgtcaaaatctgaggcagaagcttacaatgaacacttgcttcaattgactttgcagccttataagtacatcttgattgttttaatcatcatctttatcgttttggcagttactaagatgcctcgcgctaaggccttctcaactggttctgaaactaaagaagaccaaccatcacttggcgaaactttcaactacttattccacaataagcggtacatgaaaggggttctctgtcagtttatttatgctggtatgcaaacgactgtatggtcattcactattcggttagcattacgccttgattctcatatttctgatgcagctgcttcaactttcatgatctatagttacatcgcttggttctttggtaagttagttgcaaactggttccttgaccgttactcaattactaaggtattaacttggttctcattacttggaacaatttcattagtaattacctttactgttcctaacatcacagcggtaattgcggcaatcgcaactagtttcttctttggaccagaatggccaacgatctatgctcatacccttgatcaaattcatgaaaagaagtacaccgaaactggtggtgcatttatcgttatgtccttaattggtggggcaattgttccaacaattcaaggacgggtatcagatttaactggttcaatgcagttatcattcattgtcccagcaatttgtttcgcacttatcactatttacttctggactgagcaccgttgggaaaaggctcatccaaatgaagtgcaagaacactaaaatttcccaggaaataaataaaggcccagcggttatttaatcagctgagcctttatttatttccaaaactttaaagtaatttttttctagattaagctaaacacgaaatgaaatgatataatatgaacgtgatttagaggatggtgaatgcgatgcaatttataatttcgcttctaacatggcagaatctgattcacttaattgatatcttagtaatttggtttttaatctacgagttattaatgttgattcgtggtacaagagctgtccaactatttcgtggtattctgatcattattttggttaagattgttagttggtatgttggtttaagtactgtttcgtgggtaatggaccagattatcaactggggtgttattgcaattgtcattatcttccagccagagattcggcgcggactggaacaccttggtcgaggaactttctttactcataatcaaacagcaaatgagaaagaagaagatatgattaagcaattagaccaagcgattcagtacatgtcaaagcgaagaattggtgctttaatgagtattcaaatgaagactggtctagaagagtatattgaaacaggtattccactcgatgctgatatttcaggggcattacttattaatacttttattcctaatacgcccttacatgatggagcagtgattataaaaaataatcggattgcagtagcggctgcttatcttcctttgtctgatagtaaattgattcctaaagaattagggacacgacatcgggctgctgtcggaattagtgaagtgacagatgcattaacaattgttatttcagaagaaaccggcgaagtttcaattacgaaagataatgaattaattcgaaacatgtcgcgagatgaatacctaaagttcttacgtgctcagttgtatacgcatgagcctcaacacgaaaacttggtaacagaactttatgctaagtttcaacgtaaaggaggtggccgtcatgggcaaggacactaaaggcttctttcgccggaaatggtttttgagaattatttcgttaatcctagcactctttctattcatgtatgtaaatgggagcaaaagcggcttccttcgtcaaaatactcggaataataaccagagtagtgctttaatgtcgaataaatccgttacccttcgaatgccccttgatgtaacaattgataataataagtatattgtcagcgggtatcctcaatatgttaaggttaaggtaaccggtccttccgcattggttacaactacctctaatactcaaaattttaaggtgtatgcggatttgtctgacttgactcctggtaaacaccgagtaaagttaaaaacgagtgggttaaattcagaattaacttctaaaattgagccacaatatattaatgttaatattcaaccacgcaagacgattacaatgaaagtaactattcgtttgagtactagagatttggataatggctataagcttggacgtccacatagtgatattcagactgtccaagttactggttcacgagatgaagttaataaagtaaatcgaattgttgcttttgtagcaattccgcacgatgcaaaggatagtattgcacgacaggtaacactacaagcaattgatcggaatggtcaaacacttaatgttgtgatttcaccaactactactaatgtttctattcctatttctgcgggttcacaaagcagcagttcaaatgatagttcatcaagtagtagtggtagtgaagagagtgaagaagcaaagagtaattcaagagcaacatcgcgaaatgactcttcagattcttcatctgaaacatcccaatcttcaagcagcataagtaatgaagattcaagttcaagtagtcgaaatcaataataaagatacacatagaggagaagtgaaatgaagttaaaatattttggaactgatggagttcgtggagttgcaaatcaagatttaagtccagaattggcgttccgtgttggtcgcgcaggtggatatgtccttactcggcactcggaacgaaaacaacctcaagtattagttgctcgtgatacacgaatttcaggtgaaatgctagaaaatgcattgattgctggattattatccgttggtattgaggttttacggctaggggttgtcactactcccggggttgcttaccttgttcgggcacaagaagctgatgctggagttatgattactgctagtcataacccaattaaatataacgggattaaatattttggtggtaatggatttaaattatccgatgaattggaatatgaaattgaacaattactagatgctgaagaagatacgttgccacgaccatctgatgcaggcttaggaacagttgctgattatcatgagggagcattaaagtacacttcattcttggaacaaactgtttcaagtgatcttgaaggattaaaagtggtagttgatgctgctaatggtgcaacaagtggctttatctctaatctttttgctgatatgaatgtggactttattccaattaatgatcaaccagatggcttaaatactaacctaaattgtggatcaactcacccagagagcctccaaaaagcggttgtggaaaataatgctgatcttggagtagcatttgatggtgatggtgaccgttgcattgctgttgataatgagggaaatattgttgacggtgataagattatgtatatctgtggtaagtacatggataagaagggattacttaagaaagatacagtagttacaactgtgatgagtaatctgggaatgtacaaagctttagaagcgcacaacttaaagagtgttaagactaaggttggtgaccggtatgttgttgaggaaatgctgaaaaatggttataaccttggtggtgaacaatcaggacatattattttcttagatcacaatacaactggggatggaatgcttaccgcactgcaactcttgtctgtagttaaagactctgggaagacactcgctgaattggcaaatgatgtaacaacttatccacaagagttattgaatattaaggtagcagataaaactactgcaatggaaaatcaaaaattaaaggaaattattgcgcaagtcgagaaggaaatgaacggggacggacgggttcttgttcgtcctagtggaactgaacctcttttgcgcattatggctgaagcagctacgccagaattagttcatgaatacgttgaacggatcggtgatgttgcccgcgcggaattagaagtagaataacttgagaagtgaaaaagcgaggctggaagaaaatttattcttctagtctcgctttttaatcttttaataaattttaaatcatatagaccaatctaataaaataattgacaagataatctaaaaactgtactatacaatacagttgattagatctagtgataatcactagttatctataccaattttatttaaaggatggaatttaattatgtgtggaattgttggagttacaggaactgacaagagtttgtcaattctaattgatggattaaagcgtcttgaatatcgtggatatgactctgcaggagtttatgttaatgatcaacaaggacatgattaccttgtaaagcggccaggtcggattgctaatctagaagcggctcttggagaagaagtccatggtttagccggtattggccatacccggtgggctactcatggtgaaccaaatgaagccaatgctcaccctcaatactctcaagacgaacggttctacttagttcataacggtgtaattgaaaattatgctgacttaaagaaagaatacttatctgacgttaaatttgttagtcaaactgatacagaagtaattgttcaattagttgataaatttgtagttgaatctggaatgtcaacagaagcagcccttcttaaggttcttcgtttaatcagcccagattcttcatatgcatttgtattgatggataaagaacaaccagatacattatttgttgctaaaaataagagtccattattagttgggattgctgatggttacaacatggttggttctgatgcaatgtcaatgattaaggaaactaatacctttatggaaatcggtgaccacgagttggtaatcgttaagccagatcacgttactgttaaagactttgatggtaatgagattgatcggccaacatttaaggttgatatggatgctaatgccgcagataaaggtgcttacccatactacatgttaaaggaaattgacgagcaaccagctgttatgcggaagttagttcaagaatactttggtgacaatgatgtagcacagattaatgaagagatgttaaaagatatggcagatgctgaccacctttacatcgttggtgccggtacaagttatcatgctggcttagtaggtgcgcgcatttttgaaaaactttgtggaattcctacatctgttcacatttcatcagaatttgcttatgagcaaccactcctttctaagaagccgttctttatcttcttaagtcaaagtggtgaaacagctgatagtcgggaagtactggttaatgttaataagcataactggccaagcttaacaattactaatgttgacaagtcaacgctttctcgtgaagcaacttacactgaattactttacgctggtccagaaattgccgtggcttcaacaaaagcctacactgcccaaattgctgtcgaagctattcttgctcaagcattaggcgtttacatggataagcaagcagctaaagactttgatgttaagcaccaattaggattagttgctaatggtatgcaatcaattactgatagtaagaagaaagtcgaagaaattgcttctcgttacctctctaaatctccaagcgccttctacattggccggggaatggattggtcagtttcacttgaagctgctttgaagttaaaggaaatttcatacgttcaagcggaaggttttgcatctggtgaattgaagcatggaacaattgctttaattgaagatcagactccagtgattggaatcattacccaagatcggactgctggtttaacacggagcaatcttgaagaaacgcaggctcgtggggccaatgcaattacaattgtttcacggcaccttgcaaaagaggacgatacattcgttcttcccgatgtcgatgaagtgttgacaccacttcttagcgtaattccagcacaattgttggcttactacactagtcttggtaagggacttgatgttgataagccacgtaacctcgcaaagtctgttacagttcaataaaaattataaaggaagttagagaagctttagttggtttctcaacttctttttatttttaaagtaatttgatattttctttagatttgtttaataaaagggttgacttacttttatggaaacgctaccatgatagttgcaaggtataaaataattaccttctaatcaattctctttctctcttatgccgatcatcgtcttttagacgatgatttttttatttaaactcgctataatgataagggttgaaaggggaagaacaacgtggaagaacaacacgaaacgttaacattaattgaggaaattacccgtaatgacggctcaaaatattatgaaattggtaatatggttcaaaatggccgtgcagaattagcagctgaacggaattttattaaagaggttcgtattttagaactaaatatccctcattctaaaaatattattaaatatgaacactttataaatactcactataagatgcaaaccgaagcaatggatcattgggaagaatggaaacgtcccccagagattgaagaggttgttcaaacgatcttgaaagaaaatcatattgggtaaaccaggaagctgagttatttggtagtactaaaaatggatataaaaatgtggaggttaggcaatgaagccaaattttaatccatcacaggggatgaagtcgcactatttcgttacagggatagacggcttacgaacattagctgtcttaggagttattatttatcacctattgcccaatgttttaatgggtggttatttaggagtgccgctttttctattagtctctggatattttgtaacctatcaatttagtcggcagcttaaatatggtagtcatattaatttagggcatttttatctaaaaaggtttcggagactatatccgacattaattgcgatgttaattttaacaacagcgtacattacattatttgcacgagagctactccataacattcgggcagtaattgttactaatttaacttggatatataattggtgggaaatcagtcatgggcagtcctactttgatcagtttggtggcgtttcaccttttacccatctttggacattaggggttgaagcgcaattttaccttttgtggcctttgattattacgttattgtttgcggtttttaaaaagctacagaatgtgcggcgggtagttttcatattagctgtattgtcagcaatagaaatggctcttctttacgatccggcaaatatcaaccgggtttattatggaaccgatacacgggccttttcacttttacttggctcatggttagggcttgcgtggccattaaatcgacttcggcctaatttacaggcaaatagtcgccggttacttaatattataggaattattgcaacagttttgaccattgttggttttttctcattgaatggacagtccgcctttacctaccgcgggggaatgtttctctatagttttattggaatgatattaatggctactatcattcacccaggtgcggggatgaacaagtggtttacaaatccggtttttcattgggttggccagcgttcttatgggatttatgtttatcaatatcccgttatggtcttttatgaacgagtaatcaaagtcggcaatcatccacttctcaatgcattagtagaaatcattattattttagtagtaagtgaagtttcttaccggttaattgaacgcccatttgctcagtatcagtggtcaaaattaccggctgatctccagcatgtgttagaaacgcatcactttagttggcaaagcggggctaaaatgatggtaagtgcattagttgttgttattgcatttatcggtttgtgccaaccaaaccgtgcaccaaagaaaacagcggttcaacaacggatagagcaaaaccaccaggctgctgaagaacacaataagaagattacaaagggggataatgttgcggaagctagtggtaatacttctaagcttcagaaacagtatgatttaacccctgcacaaataaaagcagcgcagaagttaaaggtaacggccatcggtgattcggtgatggctgatgccgcagatagtattcagaaattaatgccaaatacttatgttgatgcacaagttgggcgtcaaggttctgccactcctgatgttatcaaacaattaaagacagatgggcatttaaataagattgttgtcttgaatttgggaacgaacggccctatgacacaagatacgttagacgatattttaagtacgattggctctgggcaccagatctattgggtaactgctcatgttccaacaaagccatggcagcaaacggttaataacgaaattaaagatttagcaaagaagcataagaatatccatgtggtcgattggaataaggcaagtcaaggacactctgattggtttgcaagtgacaatgtgcatatgggaccaagtggaaatgatcattttgcacggctaatcgcaaaggagatcttgacaaaaaaataggaggttagtaatgacacacgaagatcaattattagacaaagctatcaatatttacttaacaggattaaagggcatcgaaagctttatttccgaaccagcgagtgaatataatttatcttttgaacaattcttgattttacgaaaaataattaaccatcctaatatcaaactaatggatattgccgagcaacggcaagtaacaaggagtgccgtctctcgccaattaaaagttctttttcaacaaaaatatgttgaacaaaaagctgatccagccgatcgacggcgaatgttcttagttgcaacaaaaaaaggcaaagatgctgaaagtgagatttggcaaaggattaatcaccgctttgccaattgggttcagatttatggtgaagatcgtgctgatcagtttttaacactttttgaagactttaatcaacaaataattcaggggaatatccgaaagaaggaataagaaaatgattaagatggttgcgctagacctagataatacgcttttaaatagtaataaagaaattagtcaacgtaatgaacatgtcctaaagcaattacatcaagagggaattaaggtagtgctttgtactggccgcccaatcaatgcaatttggccatatattgaacagcttggtttaactgattcagatgattacacagttacgtttaatggcggattagttattaataatgaatcacgtgaacatctttttgaattagggatgaaaaagagtgatttactgccactattttcttatgttaaacgaaaaaagattcccctcaatgttttagactttgaacgggtatacgaattaaatgattatccaggatctatttatcggacagtgttaaagaatattgaattccaatctttgccaatgagtgatgtgccggaaaaaacttatagtaaagctgtaatggcaatcacccctgaaaaattgtctactattataggagaacttccagctgatcttaaagcgcagtatcatgcagttcaatctcaaccaatgataatggaatttttacctaaaaaattaaataaggcggttggactgaaggcgctactagatcattttggggatgattttagtaatttgatgacatttggggatgctgataatgatcttgaaatgattgaagcagctgcccaaggaatcgtaatggaaaacgggcttcctaacgttaaagcagtggcaacagtaattacagatacaaacgataatgacggggttgcaaagtattgtgaacgttattttgcaacacttttgtaataaagattgttataaaaagtaaaataaagagtatttttggcgcaaatatgaattttttgctaaaaaaatactcttttttatgtataatttaatgacttttcaataaaagttatggggccctaaaagctaactagcacaaggacttacagattttataatcatattaattgacaacttatattacgaaatattacaaaaagtcaacggggagtagtaaatagaaatggtgctgttacagcttagtaatattaagagtgtaatatataaggtgttgaaacggaaaagataatttgttgaataataaaggatggttgtttaatttatgatttctaagaaaaactttgctaaagtatctgctactcttggtgcagtggccttaggtgttagtgcaacggctactgctgctaacgctgacactatttacaccgtacaaagtggtgacacactttcaggtatttcttacaaattcgcaaaagacaacagtatggttaatgatcttgctaagaagaacaacattcaagatattaacaagatttatgttggccaaaagttaatcatcaagagcgatggtgaaattcaagaatacaacgctcaaaacgcagctaatgcaaacgtcgctaataacaatactcaagctactcaacaacaagctgcacaagctcaaagtcaagctagccaaagctatacttcaaatgcttcaggttcagaagctgctgctaaggcttggattgccgctcgtgaatctggtggtaactacggtgctactaacggtcaatatattggtaagtaccaattatcagcatcataccttaacggtgactactcagcagctaaccaagaacgggttgctgaccaatacgttgcgagtcgttacggttcatggcaaaatgctcaggctcactggcaagctaacggctggtactaaaatttaaactgaattattaggacaaagtaaaacgagactaagaaggtaatcttcatagtctcgcttttttatacaaatgtggtataataggtgtacctcttatggggatgtttatggattcgacaggtataggtcgagtttcaattgcgtttcgaaggttgcgtcttcgtaaaaacgctcagttttaaattataactgcaaacaataattcaaactcttacgcatacgctgcctaacaagtagcgcgcgtagatccattccgggttcgtccatggtgcggcaatgggttttataattagtggactacgcttgttactcccgtttgaagtaataagaagagattaatcaagctagctaaccatagttgccctgatcaacggcgttttggttagtgaaatctaaatagttgagatatgaacgtagagattgaaatggcgatatgcttggacacgggttcgactcccgtcatctccactatagggttgcacccagtttcaaatagcttcaaaatgctgatataataagatttctcaaaatgtaagatttaaacaatttcattaaattgcatttaaatgttgtatgaaatgttgtacagaaattaaatatcatttaagcatgaccaccacagtaatatgtggtggatttttttattttaaaatttattgagttgttgctgcttatcatttttgaaattgattttggtagtgtaaagatattaaattgtaaaggatgatgaatacaatgcttagtgatatagacagttggcgagatcttgtagcagcgcgtgaagatgatgaagcagaggcaaaggcaatcatgcaagatgccaagtttgaagatggttttaatgaattacagaaaatagatgataaaattattaaattgtatcgagaattcaatttaaaattaaagtatttacaagataatccacctgctgatacttccatgttgcaatggaatgaattaaagggactaaagccatttcctgttaacgaatattaaacaattagcttgcactaaatgcaggcttttttatttaccgaacgtaattatctaagttttaacttagataatgaaggtgaggtttagcaactggagctatagcgaaaggcggtagttttgtcttatattacttctgatattagaagtaatctgtttgtttacttgacaggacaagtaaatgattgtctgcttctcttcatcagttgaaagagaagggtctgtttggttcattttcgacaaggaaaaacgaacttgctttatccagatttacaattaaatctggtcaattttgattcttttggtgagtcaaaagaatgttcaattataagtctcaaaacggttagtgtttgaacgaataattgaaccagcgtaggggtgaaggggagctgattaagcgcccctccaagaagtatattagctgtattacagctaatattaactacttgcaaattgatcatcaatgttatattattggtatagaccaataaatggtatagctataacatagatgatcaaaccgacgaattacgtgatttagtcaaccgataattaccaaaaggtataggttgaaaatcacttaaaatttttagaattttactggtaatgaggagggataaaatgtgaatacaaatatcaaacgtaatatgattcaagtacgcttaagtgataccgaaatgaaaaatttcgaagcaataaaatcaacgttaaacgaaaaaactaatgctgcaactttacgtgaactaatccaattagcaccattagttggaaagcaatcgcaagagcaagttaaacatttattgaatacctacgatgacttggaagctaaagttagcgcgttgctgtgggatagttcgaatgttacaaaaaatctaaatgaaattgctcatgctgctaatattgcgaagaataatgatccagcaaatgaagacacttggaattggattattcaacaattaaaggaaattttcttaagtattaaccaattaaatcaaataggtgagcagactaaaaagttcttgaaagaaggactggaaaataatggcaattcttaattcgacagcatgtaaatcttcttatggtcgattaacttacatttttaatcaatctgctcataatacaagtaagacgaatcaccgtgttttagcttgttcaggaactaatattaatatgttgcatactcctaatggccatttatcaacattacagtcgggagcttacttagaaaaacaatttcatcaaagtttaaagcgagcttataatccgaaacgaaagtatcaagctcaaagtattattattagcttctcaagtgaagagtttgatacttccgacctaaaacggcaagctactcaagcaatgcaattggtagaaggatacgtacatcaacattttagtgatgctcaaagcgtttcttgtgttcaatgcgatggtgatggtggaaaacttcatgttcatttattgattaatactgtaaagacaaatggtaaaacagtaccaacaaatcgcttctctgtctatcgaatgcggaggaatttcaatgaatatcttgaacgtaattttcaactagttaccggaagagaatggtctaattcatttaataaagcaagtacacgtaaggatgctaaaacaataattacgcggtcaagttgggaagaacagcttaagcagaccataaatcaggttaaacaggaagtacgtaatgttgttgactttattaatcgtttgtctactaaaggcattcagattaaagaacggggtaaaaagaagcaatggacttacacccagattatcccagataaaaatggtaagccaaagcttcatcgagtgcgtgcttattatcagcgtaaggataaagctgggcatgttttatctacgcgcggcttaggtcaagcttatacgagacaaggcttagacaattattggcgtcaacaactagaaaaagaacaggagattacacctgttaaaagtcattacagaaaggaagtaaaaacaaatgacagaaaagatgttcaaactgaacgagaagaactcattaaaattagaacactcgcccgagatgctcaggcagcagcaaacgaacgacagcgacgaatccagcttaatctccaaaaatcacgttccgccgatgctgaagagcggaaacaaagaactcaacctcaaactggatcagctacttcaagacggcgcgaccaaagccgatctaagtcaattagcaagcagcaacgatatgcagaaactacgcagcgacgtgtcaaaaagcagcaagaacgtgcaaaacgaactaacggaaaagatgtcggaccagacctctaaattgatagaagtcgctaagagtacacgtgatattgcttataacaatgggttgcaagcagatattacgaatactcgtcaattggttgatgcaatgcagaaacgacaagataccgctaatgtacatatgaatgaggtaacaagacaaaatgaagctatgaatgctgatttaaaacaaattggtcctgcaattgcgaaagtagttaaggctcaaaaccataatagtgaaattttaaataaggcgttgataaacggatttcatatccatactaatgaggttacagaatctgttgctaatgagtttaagaaacttactggatttacaatcaatgagtttttgcaaaacgaaattattaagcagattaatgttaatgtttatgaagcgaaaaaagcaaaattatcggtaattcaagcagcccaagtaactgaagaagtattacataaaattgcattattaattcaacgctttataagttttgtaagtgtattagtttttgaattagggctaataattgcatgtgccattatgcttcctggttggtggaaattaataggattaatagtgactactagtgcatctgcaattttaaattattatttgaagaggaggatggatactaatgggctataacctaaatatcgatactgacaatgaaggtgcattacaattagcgatgcagggccaacaaattccttcttgggtatatgaaaactctcagatagcccatgagaataagcgaattcgtttagtagctcttcaactcgaagctgtagaagaagcacaacaaaaacagcgaggacaattacaaaaacaagaaaaagagagtaaaaacaatcagcctaataataaacgtcaacgccatcaggtaaaaaagcaaaaagatgatttgttattcgaataaaaaaaagacctcccgtcataattgggaggtttttatttgttcttaagaagttctaatattattttacttaaatgttctgttttagaataatcgtaattttcaagcttattaattaatttcgttaactgtggtccacgatgagaattgttttccgtagccgcctgattagtcattagagaatccatcgatgtgccgagagcagttgccaatcttaaaagggtagtcgaactaacatcatttgatccaccacgctcaaggcgagaaataaaattaattgatagattgcttaactcagcaagttgttgttgggtcatgtttaattcatggcgacggttagcaatattttttcctaataattgttgcatagttaatctcacttatccttttaatattaggataaaagtaagtatgactatttagaacgttatttataagtgttgatagttgcatatatgcatttataattagttatttatgtgcaatgatattgacttatgtgtggatgaaaaatataataaaaaatgttaattgtaaatagcttcttttactattcaaagtgattagtaataaccatgtatttagggagatgttaaatacatataaatagaaaataaaggtcatatcgatttaggtttaattattagaaatttaatgcgcacataacaaatataattttgggggatattatgaatagaaaaaataccatccttaagtcaactttacttgctacatcagttgtaactattagtgcagttactaatgttacggttcatgctgatgacatggcatcaaaaacgcaaagccaaaatacaccggagaaacaaattgccaaaaagcaagataacaacaaccagcaactatctgctttaaagcaacagcaaagtaactctgaaaatgaagtggctaaacaaaatgctgataagttaactgaattacaagaaaataatgctgaaaaaattaagattttagatcagcaacttcaaaaccaaaaacaagttacccaacagactgctaatgatcaattagcggctaaaactaatacagttcgccaatccgaacagtcacaagccgttgctgaaaataatgcttaccaatctcaagtagatgctcaaactaaggctaacgatcaagccgttgctaaccaacaacaagcaaacgcccaagaattagctaacgccgctaagcacatcgttacccctgaacaaaagcaaagtcaaattgactctgccactaagaacactcaacaagccttaaaccaagctaagtctgatcatgacgctattgttaataagttaaacgatcaattaactaacgacctcaagcaaagcgctcaacaagaacaagcagctaagaacgatcttaagcaacctagccaagcagataagcaaaagcaacttgatgatgcgcaaaacgctgttaacaatgcacaaggtaaagccaatgacgcgcaaaacgccttaactaatgctaagaataccctaagtgctaaccaaagcgctttgacgcaagcacaagatggtcaaaaagaacatgtgactaacgctattaaattaccagctggttacattgatgcttggaaagaatatgttaacactaaagaaaaaaatgactatttagtaacagaaagtacttatccagacgtatttaagaagcttgaaacgctagataaagaagcattaaagaacaacgtatatcacactaattcagcagcagaaaaagtgccagtgaccttaaatgctaatggcactctttcacgagatgacattatcaaagccactcaatttgctgtttcattactaaacccaattcgtgaagcaattggcgttactccatacaagatcaccaacgcatctattgatgtcgctcaagatgttgctaacgaatatcgcaaggataactggaatacttgggaccacgcacacgataacgatgctctagatcgcgttgctaacaaatggaatattgaccttgtcggcgaatcatgggctggagacggatcatttggtcaagtcaaatggactccaaacaatggcgatacaaaattcatccacaactataataacctaacactaaatgatttatacaaaggtgtttatagttcaatcttatccttattgttccacgacgccgatcaaggttacggtcacgccactgacctattaggtgttcgtgccgctaattccgatttaaccgttgctggtgacaaccttggtgtaagctttgaatacggcaaggggatgaaggcttggggccaaaccaacgttggtggtttccacttcaactctatttctgacgcttcttccaagaacattcaacgtttagttaaggaaggctacgttgttgacgccgctgatccaaatgccaaagttaaccaaccaggctatcgtgatgaaatcgccattcctggtaacacatctcaaaagcaaatcgctgatttacaagctaagatcaaccaagcacaaaaccaaattgatcaattaaccaagactgctaacgcagctaaccaaacattaactgcggctaaagctaagttagctgatctgcaaaagagcaccactgatgctaaaaacagttatcaacaacaattagcagccattaacactaagtacagcgatcaaacaactaagcttaaggctgaccatgacgctaagatcaaggccgaaaatgacgcttaccaagctaaagttagtcaattaaacaatgaccttcaaactaagatcaacgctattaaggctcaacctgaaaacactgatcaattaaagacccaacttgaccaaaagctggcccaagttaagcaagatggtcaacacaagcttgatcaattaaagcaagctcacgaagctcgtttacaaaagattcaacaagacgctgaagatactttagcggcatacaaggctaacttagacaagaatgctcaaattaagattgctaaggctcaagctgatcacgatgcatcagttaaggctcttaacgataattatactcaacttaagaaccaattagatgctcagcaagctaagctcgttagtgatgaccaagctcaatacaatgctcttgctactaaacttgacggcgaattagctgccttaaagaaccaagtattgccaaagactagcgatcaccaaactgctcaaaacaagcaagttgttgctggtaacaccgataccgttgctttagatactactggtaagactactgttgtgttgcctagagtgactagtgatatcaatggagaaaaaccagagtcagttaaattcttaccgcaaactggtaacgaagagaactcgtttgcaattatcgcactaggtgctttcactgctatgtttggtatgaatttagcttcacggaagcgaaagttttagtttgaaatatagagggaattgatagcattgacagtagaagttgataatgattcatatttttatagcctattaaaagcacatgcagcagaggtagcgaaagagccaggaaagtcgccaagtcactacgcagcatacggtatgccaatcgatgtattacgacaaaatataacagaatatatgtattatggaaattctgaaaaaattgaaaaaaagatacaaacaaccatctcaaacatagcgtatactattcaacttttggaattttatattaatgctaagaatgaattatatttatcctatccaatggagagaatgttgaataaggaaattttaatcacttcctttgaaatccaagaagctctaatcagtataatgtttgacggatactataaggctaaaacggcgcaagaaagaattttaaagcttaaaaataagaaaaaattaagtgaagattttattaatgctttagacgatgaaagaaggtatcgtaataaagttcatttaactggaaaagaagataattctattcctgactataaaatttttgatgatactgaaatggttaataagtcaattaatttgttaaatgagctttttgaactaaaaatacatgatgatcaaaagatagtattaccaaatgttaaataataaatcagatatcaatccagataatggacagcccaatgtagactttaagtaataccataagcaagttcagctcaaaatagagaataatatgtgtttactaaagtagttgcgaaatataagactgaacatcattagaaaaaaagccctagttaacgggctttttaattttttaaaacccgaaatgtcaatttaagttagaaagaaagtagttgctcatcagtgacgtaggacatgaatacctcatatggagttcgatagcctagtgatttgcggggcaggttatttcgcttactcatcagttgggtcaccaattcatcaggaagattgcggaaatctagctgttttgttaagccgtcccggcgtaaaagaccgttgttgttttcgttcagccctcgttgattgggagcaccaacctcggcaaagtaagtgtgaaggtcaaattgattggcaatctcgcgccagccggcgaattcttttccgttgtcaaaggtaatcgatttgaagaagtgctgcgggaatttccgaagccactgacctaagtgttggttaatcgcatcagccgtcttttcgtgcacattgagtacaatttcgaccttcgattggcgttcggtcagggtcattaccgccccttggtgctttttgccttggacggtatcagcttcaaggtgtccaaattcagtggcatagtgcggaaagtccttggcacgctcgtgaatacttcgccccaattggccagccttcccgcggcgctcaatatagccattcgggtgccgcttacctcgcatgggcaaagcacggacatccaaaccgaactgcccccgttcaaacatccggtaaagagttcgccggttacaactaattgggcgctcagcgcgcccaataatggtgtcaggcgtccacccctgggcaattttgtcgttgatataagtaagttcagccagtgacaactgagtacgttttcggccacaacgttgcttattgcgcatatagtgatcttgataatcagcaattgaggcaccggtttccaggtaacgataaacgcgataaacggtttcggcgctacggttgatcatttgggccactcggtacgctttaagcttttgcacgaaagaatgggcgatgattgtcagctcgtttgtggtaagatgggtgtaagtcatttgtggtttcctttcttttgtttaggggtattcaaaagtctaccacaaatggcttttctatttttctaacttaattttacaaacggcgaaataataaatgacaacctttaagctcaatttcaaagtcgctactaatggtattaagactaagtatccagttaatatgatgtgattttataaatttattcaaagagtcgaaatatggtgctaattcagttagacttatttcgactcttcctgtaagacgtaattcatctatttgtgcatcgttaagttgataaccgcaagcaccttttatttcactaacaacagtattaacatgtttttctattacttgatttaattcgctcattacttatccctccgttaaatgtaagatattgagattaattacagtttgaatcgtcatttaagattaatgtgtaaaaacctaaaaggttattactaatatctgtagctttatacattgtccacacacgatcttcttgagaagtttctcgtaaataatttctaattttagcaatgtatggtttaatccgttcagcagtaaagaatagtaagccactatttaatagtgcttgttgctcactatctgttaatagaagacttgcttgcagttgcaagtcctcattaacctcttcaataatttcattcattgtttgcataataaaaaacctcctaaatttttgaattcataaatttttctgcgctgaaagcgcgaaactttagaagctatgtgtttattgttaaattattgacgtacattattgcgtacgttataattacggtataactataatgtgaaagaaggttaattaaatggataacattattacaccaactaatgcgcgaaaaaatttatataatctgattaagaaggtcaatttagatcataccccagtaacaatctcttcaagtaaaaaagaagaagatgctgttttaattagtaaaagcgattgggacgctattcaagaaacaatgtatttagaaaataatggagttggtgatgtagttcgtcaacgtgagaaagatgatagtggctttaccgatatagatgaaattgattgggataagttgtaatgtataaagttcaaattaagaattctgctaaatcagatctaaggaaaattaagcatagcaatttaaaaggaaattttaatagggtcatccaacagttaaaagaaaatccatatgaacctaatcaaggatttgaaaaattagagccaccaatggcgagaaagtattcacgaagaataaatgtccaacatcgtgtagtatatgtagttaatgataaagaaaaagtcgtttcaatttattcggcatggtctcattatgaataaaaaagagtaatgagcctgtttaactcattactcttagtagtaacattagcaaaaacacattttttaattagtcttgaattcggtaagttcttaaagtatcaataatgttttccctcaaaacgcatagtgggttaataaattgatctttgtttcgctttaatgcacgattgaatgatttgaattctttataacggtcttgaaataaatcattataaattagctttaagtcatattcatctgaatgctgtgctaaatagcgtaacatcactttttgaacatattcttttttataattttcaaggatttcaggataattcttaccttttaaatacgtatcatctttaacccacgatacatgtttctcaatccgttcaccatgatgataatcgcgtacagtttgatctaatcccataaactgtttagcgtatttttttcgaaagcttgggaagagagaacgataattctttaattcttttcgatacgtcattaactcttcgattgaggagaagggacgtgtcaaataataaccgaaatcactttggggtacaaagccaattggttgataagtgtcgtcgggactcaagttaagccatttagtctgtttccaagttttcatactaacatagcgcttattatcaattgagtgtttcatgtcgtttattgattgcattctaaaatcatcaactttaaatgtcacagtatccttttcgagtagtttaattagtcgatctgttgtccagctgttaggctgtaatccgactagcgctttaatatggttatcttctgtcatattgaaacgagtgcgaatgttgattagagcagcttcggtatatttttgattgtgattatgcgactttagctcaaaaaattgtccaccaaagttatttttgttaactatcacccagcggttatcaaaatagttttcacatttttgacgaataatttcttcattaagtaagttgttagaacagaagataaacccatcagtggtcagtgaaggaacgagactattcgggtatgtttgttcaaccaggtccatcaacgcattgacttgatatcgggcaattgacgtgtattgtgcagctgtaaaagggttagtattacggctgaaaggtacatacattgtgttgccacttaaaaagtctcgtgttccgccagaacctaacccttgggctgatttaccgtagccaccgtttcctaataacttatagaaaagctgaagggcgtcatattttcgatattcatcagatttagagtcaaatttatcacgttttgctttagcttcatttcgacaaattagtgaccaatgctgcatttttccgattggcgctagacaggcaacatgtccatccaatattttttgttcaggaataatgattcgatgaactctaacagtacctccgtgttcaacaatgttaataatatcagttacggtcatattaacatgatttgcttgccggacgtaaattggcccttgatcttttattaaaggcttatagccaaccggcacacgttttacattgtccggaaagtgataagaaacattagcaacaccgattgtaaaagctccatttacaaaatattgtgaatgtttacggtaattttttaaaatgttgctatctaagtcatgtacatctaaaattggtttacaatcaagcctaaaatctgggattaagtgaccagcatctacatagcttgatttgagatcaatatcatatttatatttaaacgcactcgtgataattccagggttaaaggctaaattcattccaccaacatacgcttctcgtgccatagcgaatccatcattatacacggaatcaggtcgaacgctaaattgatcatgactacctttcttatgttttttatcaactgtactagattcaataaaattataacctttccgcatttgatcaaaattcaattgggttgttaaaaaaatttcaggcgaccaagtaattacatctttgttattaaaccaagaaacagtactataaatagaagcgttatttaacttagttaggatattatcaatggttggaggtacattattacgtgtgtaattaaattgatgtgcatgatccgcatattgattacgtaacttagtgctgatcgcaaattttggcttactgactttgaccttctgatttatcaaattgcttacatcaaatttaggattatcttcgtataactttttaaagttaattcgatcggctaatatcgaaggtgatcctttttgatttttagcaggtgctgaaccaattagcttttgatagatatatcctttcttgcttttcttgtaagcaagtgtacctcgagcgagataaggttttagtttttcaataaatagtttttgaaattcaaaattatctgaaccatcaacagcatcgcttaaaactttaacccattctctcgtatctctgggtggttcttgattgtataattttggtcgtaaatatttatcaacatcaataccgcgaaaaatatcttggaaaatatttttaaccgtttttgaatcataaggttcttgagagtaatgagaactaatttcatctgctaaagatgttactgtcgcgggaatatgcacattttcaattaattcttcattatatacatcaattacatttcccataaaaaagtctaagtattttaaagtaacttctgaatcacctagagcatagtttaaataatcatcaggacgtttttctaataaagaacgcatgtgagatttataatagccaccgttataaggatcattgaattcttcaaaagaaattagtttatcctcaagatcccaatctttcgtgttaagtttcttttgatcaacaattgatcccaaggctgctaaacctccttgtggcccaaggggcattgtatcgacaaatttaatagttataggatacttgattcgtcgtgaattaggatttgtaaccatgattgaatatggattactaaagaattcttgcttgtttaaagcaataaaagttggttcattctttgactttccttgaatatctaaatatttttccaatcataataggcggtaatgtcaacacctgcaaagaagcctacatatacaaccggcggaactcgattcgatttattcaacttttctttaattttatcttcttttaaacctaattgtcgcgctagtcgtcgataatctccgtctgtatattcttcacagtaaccaacattattaagataatatcgaacaacgctaataagatcccagaagctgaatgatttgtctccaggttgacgataaattacaatccccatcgcagaatattcagcatattttattacgtattgatgactaataatatcgtcttgattacgatagtcagtatcattactatggctctgcgatgtgtcccattcgctgtcatcagcaataaacactgtgtcaagtccataatctttttttaatttagaaagattttgataatcatcaatcttataatttctaattttaaaagttcgtgttaatgtgttaacaccgctcaaatttatagcctccttatataactaaaggaagcaatactaaaaaccacactatactaaatagtgattagtacacacaatatttatatgttataattttttaaatactgaagtgagtttttaattggtaatgatacttcactttagtgtttttaatattttttgtttggagaattaatcaaatggcggtttggttaattcttttttgttattttgggtgaacacttttgttaatgttgttcacccaataaatgctctgctttcttactgtcacaacgattacggtagggtgtcaagcgggttctttatgggagagtccccagaggtgctaccttttgacactaattcattattaatgataattgctaatccatttaccattccaagctttatttggaaggcgattatgaataccggctaaataaatttgcttggttgtgggtcgcacatgatgcgaacgataatacttaattaacaacccggttagtgatttattagggtcaacttctcgttgaaaaatattacctggcaaattttgaggaaggcgattataaaacggtggacaacagataacatcagcgatctcgaactttatctgataaaacagagcttgaagcaaataattattactgatatttaagctttttgccactaaactaaagtcattttgatcacttcgatctcgcttgtttttgttaaaccaaagcaagaaatctcctggaatgagagatgaagctaaaggatgcaattgactgcgataccaccacgaatcatgcggaacatagtcaatttgtagtttactccgctcaattgttttattagatgaagaaaaagtataattcaaatattgtttatgatgatgctttgagatacctttttctacatctacattaattaatgttaattggctttggggctgcgtgaataaagagttgttcagactaacgctttgtagtaatcgtgtgtaagttgctgctgtaacttgtgacggttgatgtattgctagctcactaatttttaagtttaacgctgtcattaacgaattgagcgattttagtgcttcagttttttgctcttcatgtgatgcgttaatcataagatcacatgtcttaaaattttcactaatttgaagtaatttgcgatgcgaagatgctaatgtgagtttgattccaaaatttgggtaaatcacttgtgcatcaactaaaattaagtctttaatagactctgtaagtttactttccaaaagcactcacttcctttttgaaaatgacttatagtaatcgatataatcatcaatcgcccagctaaccagctgattaatggaccgaggtggtttacaaccaggccaaaattgcatgtcaaacaacattttttgtacaatagcttctttgttctcgtccaaattaataatgtaattaataataaacactcctcgatgttttccttgctattaattaatctttagaagtcataaacttatcaagttcatatcgattgaagcgataagttttgccaaatttggtatatggaatgttagtagtagcaatccattggtcaagcgtattaggagctatatttagatacttagcagcttcagactttgacatataaggtggatattggctagtaagtgctcgtttgcttgcctcttcaattgcttgagtaactgcatatttgattgaattagctaagaaatcaggtaattcaactttgatttttgacatttaatcatctcctctcttctcctctttggttaaaataaagttaactaaagaggagaataatatgcaattctagccaaaattaagtaaactaaattttaaccgaattgcttgacgcaatattacaatattactaaaataaaatcaagtaaaattaaatagatttcttttttattcttagttcgcaatggaggtaaattgcgtattatcaactaaaaatagcgattacgattttttttgaggaatatgaagtgaactttgagatatataataaaatagcaattatatcgaatttagatttataacgtaaaaaggtggtatttatgtataatcgggttgcattaggagctagaattaaagttgttagacaaaaaagaggtgaaactcaaactgagtttggaaaaaaatttttgccacctgttagtaaagttgccgtttcaaaatgggaacgcggaattacaaaaccaactgcacagcgtttgcgtgaaattgcgaaacttggtaatgtgacagttgaatttcttattaatggcgacaatacgactgccgaggaagcgcaaaagttgttaaataaagtcattagccgatcacgatctactaatgaagaagataagaaaagattgaacggtattcaactggaattaagacaaaagcttaaatctcatgacgatgctgaaaaaatagcaggtgttaacaaaaaaactcatttattaaatgatctggaatcagaaattcatgttcttgatgaagatttagattattcaagtttagtaacatttgatcaattttttaagctttttaattttctaagtagtattaaaaatccttcaattttaaaagaatttaatgagattctttggcatattaatcaaattgctgaaggaaacgaaatttacgataaagaaagagatttattaaagatagataatttcttgacaaaattaagtatgtctaattagactgatagatataatgtaattcacttctcgatgtttcccttgctcaatcatgcttaaatgatgtacgcagaaagagagtgaaattacatggaaccttatgggtataatacaaaaaagggtaaacgttatcgggtagcttaccgaactccagataataaacaacataataagggtggttttactactaaacgtgaggcacgagcttggtatcgtcaaaaaatggtcgaaattgagaaccatggctttagtagtaatggaaaggtaacgtttgaagaagttgctaatcggtggcttgataataagaagcagacagtagctggctcaacctataaaaaatatgaaacggaatgtaataaacatttaatacctgctctgggtgataaattacttaaagatatcagtattcctacttgtcaatctttagtttatcaatgggctaaagatttcaaattttataataaaatggtcaatgatgccgcaagtatttttgatctaggtattaaatacaaattgatccatgataatccttttaaattaatagagcatccaaaaaaagataaggatgatgaaagaaaagtaagatcatttaccaaagatgagttcattacttttaaaaaaggattgcatgagcattatgaatcaacaaattataaggcgtttgctttcctttttatcttgtcacatacgggattacgaaaaggtgaacttctagctttaacatggaacgatattgaccttaaaggtggattccttcatataaaaagaggtgttacccgtgatactaaaaataatcttataataggtggaacaaagaatatttattctgtacgtgatgtacctattgggccagaaactattaaagtgttggaaaaatggcgttctgagcaatatcaagaactgaaattttttaatattaatacttttaaaccaaatcaattagtatttacaggcgaaaaaggtggtatattgtcaccgtcgaaacctggaaaatggctaaatgtaattgagaaaaagtataatcttccctcttatgtaacgccgcatggactgaggcatacatacactagtttactaattgaagatggaatgtcggtcaatgatgttgctagtgtgttagggcataaagatgctacaattactataaaagtttataatgatttacatccgattaaagataattcgatcggtaaaattattgagaatctttaaaaactaaaatgttgtagagatgttgtataattaacatctaacaacataaaatagttgatatagcagcctttgggggacacgggttcgactcccgtcatctccactatatgcctataaggactgccattggtttatggcagtcttttttaatactaaatattgggataattagtggggtttcataagaagatattctcatgtaaaaattagtaaataaagttcagataaaatataaaggaatgaattaaatggaaatattaatgattgaggataatcattctgtctgtgaaatgatggcaatgttttttaagaaagaaaaatggcactatgaatttgcttatgatggcgtggaagcagaagaaaagtttaacgctgaccctcataaatgggatattattttgctagaccttaatcttcctaaaaaggatggaatgcaggttgcagctgatgttcgacgggtatcaccaacagttcctttaattatgttaacagctcgtgatactgaaagtgatcaggtattgggattggaaattggtgctgatgattatgtaaccaaaccatttagtacgattactttaattgcgcggatcaaggccctttatcggcgaacacatttaaacaaacttgaggatgttcaagatactgatagtgatgatacattcgatattcaaacaaagaactttaagatgaatactaagacaagagaagtattcttatatggaaaaccggtcggtgacttgacacctaaagaatttgacttattaaagacgcttgcctctaaaccacgtcaagtattcacccgttcacaacttttacaattagtatgggattatgaatattatggtgatgagcgaactgttgatgctcatattaaaaagttacggcaaaagttagaaaatattggacctcaagtaattaagactgtatggggggtcggctataagtttgatgacgagggtaacgactaatgaaattaatgtatcggttgatgctttcattttttgcgattattctgacgctaatggtgattgttagtatttcgtttataaatgtaactaataacactatgtatcataatacgtggcaacaattgaaaagttattctgatagtttaattcaggattctattcgttacaatatggcaacccaaagttttgaagggtttgctacagaatcgttaaatagcaatgccaatcttttaacacggcaaaatgttcactttgcaatttatgatacaactcaccggaaaatttttgccagtaacggctttgctcctagtatgagtaaaaatgattggaaaaagttaagaaagggagaaactgtttgtactaaactaattactcctaaaattaattcacgagtatcaaaaggtgtttctccacgaatgaccgaagtttcacgaccatacttctataaaggaaagatgattgcggtagtttcgattgcaactttcgtctcgacaattgagcaaaatatgcaccaaataaagattaacttaataatggcactactgactgctagtcttgtaacgcttgcagttagttacttcttggcacggtcaattaccaaacgaattgatcgattgcggatggctactcaccaaattgcgcaaggaaattacaatgttgaagtggacgataatgggcgtgatgaagtggcagacctcggtcggagttttaaccaaatgaccgcttcgttacgtgaatcgcaacaagaaattcgccggcaagaggagcgaagacgccaatttatggccaatgcagcccatgaaatgcggacgccattaacaaccattaatggaattcttgaagggttacagtatgatgcgattccagaagaggataaaaagcatagtatccagttaatgcaaaatgatacgcggcgtttaattcgcttggtcaatgataatttggattatgaaaagattcgcactaaccaaattgcgatggaacggaaagtatttgatgcatcggcagtactcgaaaatttacgagagcagttagcgaaaaaggcaaaagagaaaaaggatactctgcacttggatgtagaaaagaatttacgggtatatgcagactatgatcggtttgtacagattatgttcaatatcattcaaaacgcaatccaattcactgataacggaattattgacattcggggaaaacgtgtggaaaagggaagtcaatttgtagttcaagataatggaattgggatgactcctgaacaacttgaaaatatctgggaacgatactataaagctgatcgttcacggatgaatactaagtacggagaatctggcttgggacttgcaattgtgcggcagttagttcttcttcatggcggaaaaattgatgtaaaaagtcagtatggtaaagggacgacatttacaatctttttccctgatcgtgaatacgctcctcataatattcaacctacaaataataaagacaaaaagtaagccaatgatttaagtgaaacgctttaactgtgataataaagtgtttattttttgtagaccaatttttataatccaaagagatttaaagaaagcgcttgtgaaagcgtttaccatatgatacacttatatctcgtaataatattacggattgataggagagaattttttatgaactacttacttgctttaatccctgcgattggttggggaattatgccactgatcactggtaagatcggtggttcaacgattaaccaaatgtttggtattggtgccggtgctacgattgttgggttggttgcatttattatcggtcatccaactgttacaacgactggattctggttctcagtactgtgtggtgctttatggacaattggtcaaattggacaattcgtttcatttaagcggatgggtgtttcaaacacgattcccctatcaacagtacttcaattagttggtaactctttgattggggttattatctttggagaatggcgtggagcacgtacccttactattggttttatcgctttagcaattgttattgttggtgctttgatgacctctgttactgatcagagcagcggaaagaaaattactgttcagaatttcctttttctattaattacttctattggttactgggtttactcagcattccccaagatgccaatgattgctaatgatagttctttaggaatcttccttccagaaatgcttgggattttacttggatctgttatttatgctatttgttcaggtaatattgactcctttaagcaaaagaagcaatatctcaatatctggggtggtatttcttggggaattgctgccttagcttatatctttgctggacgggcattaggaattaatacagcctttgtctttacacaaatgaacgttattattgcaacaattggtggtatcttagttcttcatgaacacaagactcggcgagaaatgtcatttacaattgccggaatcatctttattgttgccggaagtattttaactatttttgcttaaattatattaaaactaaacttaaaaagaccttcatcggattttgatgaaggtcttttaatatcgaaattattatttaataagggaaatttcctaagcgatctttttcagtaatgggacgaattactttgcctgggacaccaaggacaagggagttatcaggaatatctttagtaacgacagtacctgccccgataacgcaaccattgccgattgttacacccggacaaactgttacattgcttgcaagccaacagttatcgccaattgtaactggtttgccatattcaacgtcatcgaacagatcgtcagcttgttgacgaatattacgctgctgatacatgagaggatgtatggctgtaatgatcgagacgtttggaccgcacattacattatttccaatagtaacaggacatgtatctaaaatagtaaagttaaaattagcatagaaattcttacctattttagtaaaccgaccgtaatcgatatgaattggtccttgaagatatattccgtcagcatgctgagaaaataggcgatcaataatcattcctcgttcaacagtatcttcatcagttgttaaattatagtcacgataaagacgatgagcaaggtgagaaaacttattgagttccggtgttccaggacgataaggcttcccagctaacatattttcagtgtttttatccatgaataattattcccttcaatttatgtaagcggatacgctgtgtattcccagtatgcctaattaaccttaaattgtcaattttcattaagaaaaatttgctagttctgattgaaaccgacttcattatccgctatcatttaaatgtctaaaaaataaaaatagaaagaagctattggaatgacacacattaaatttgacagtagcgcattaaagcaatttgttcatgaaaacgaacttggcgaaatgcaagcaatggttaacgccgctaatgatgaattacggaatggaactggtgctggcgccgacttccgtgattggctccatttaccaaccgaatatgacaaagaagaatttgcccgtataaagaaggccgctgacaagattcaacgtgattcagacgtcttagttgttattggaattggtggttcttaccttggggctcaaatggcaatcgacttcttacataataccttctaccaagctcaaaaggcaaaagaccggaaaactccattggtagtctttgctggtaactccttgagttcaacctatgttcacgacttaatccaattaattggtgataaagacttttccatcaatgttgtttcaaagtcaggaacaaccactgaaccatcaattgccttccgaatctttaaggaccttttaattaagaagtatggtgaaaatgaagctaataagcggatttatgctactactgataaggctaagggtgccttaaagactgaagcagatgctcatggctatgaaacctttgttattcctgatggggttggaggacgttactcagttctttctgcggtaggtcttttgccaatcgctgcttctggtgcggacattgataagttgatggaaggggctgcacaagcggaaaaggattatgttgatcctgatctaaccaagaacgaagcctaccaatacgctgcttaccggaacattctttatcgtaagggctatgaaacagaattactcgaaaactacgagcctaacatgcggatgtttgcggaatggtggaaacaattagctggggaatcagaaggaaaagatcaaaagggaatttatccttcttcagctaacttcacaaccgaccttcactcacttggtcaatacatccaagaaggtcgccgtttcttaatggaaaccgttgttaagctcgataagccaaattatgacatggaaattccaacagaaccagataatcttgatggtttaggctacttggaaggtaagacaatggattacgttaacaccaaggcttatgaagcggtggttgctgctcatactgatggtggagtaccagtgatgactgttcatatcccacaagaagacgaatatactttaggttaccttatttacttctttgaggttgcgatgggaatttcaggttacttaaacggtattaatccatttaaccaaccgggtgttgaagcttataagtctaacatgttcggattgcttgggaagccaggatatgaagagatcggcaaagaattacgagctaagatggataaaaacgattaggataaattagatataatttaagaagggaatagctgttacgacatagctattctctccttttatctggagtatttttatgaaaaaagaagaattaattgaacatcgggatcgggtaaaagatcatttagtagtgtggattgttttaacaatttgtctgcaaatattaactgtttttcatatcttagcgttcttaaaatatgtagtatggctttctgctgcctatagtattttactaatcatcttgtggtgttatttagaatttaagctcctacatttaaaataatttaataaaaggagtgggactataaacttgcttcgagtttttagtcccacccctgcaagaatgactacgacgcgaagctagcctattggggtattatggacgctgatttatcaacgttcataatccatccatctactgcgttttggcagtttacactttaaaatagtaaagaggttggattattttcccagcctctcttttctattaaataagttaaataagaccaaaacgatttcttgcagctgtattaatacagtttgctaatttctctttaacctttttatttatatctaaattatcggtatcatttttaagataggcattaattatgattgaagccattacatgtttaggaacagaaaatattttaatatccatgtatttaggggggcgggaatatcttcaaaagtgagaacaatatccttaccattaacactaattgttgttttcccgcccttcacaactgtgtagtcaagttcgttaggggtacaatttttatatgcagtcataatggttatcccttcttattattaatattattgttagtataacataatttaagttataatcgatgattgtaaattgtgaagagaagaatggtaagataattgaaaataaaattggttaagaagggaataaaattataatgaacgaatatgtaattggggttaacctaggcacaagtgcagtcaaggtttcagcgatggaccgtgatggcaagattgttgcgcaacaaagctatggttatgatctccatcagcctcatcctggctacagcgaacaagatccgcgagattggctttatgaaacaacgattgtaattgatcaattaattttaaaagaacttagataatgtaaataacggagaaaacaaccgtcttaaggtcattttctccgctattttattgttaatttatttcttgaatcaatccattaaagaagtgttttagtgacacttgcccaccattagtacgctctcctttgagaaatgaaatttcattgtggacatttttatattcatataagttattcgcatattccaaaataatgtcgttttctggataatccatacacatatgtgcgagattattaagaccagtttttatatcgcgtcgaattcgttggaaaattatctttttgccatgctcatcacattggaaaaattcttcaaagttaacctcatcaaaactaatttcccgttcaatcatcgtattaataagtttgttaattgcaggagcgccatttccagctgtaataccgagaaaacgtaagatggactgagcgttttcttttttcttatttttcccactgatcgtaactgtattattattcgttgcagcaccgcttacaaggtccaaaacttgaaggaggcggttagacatattaatattttgcgctgctagtttaatcactgacttaacttctgcaatgtttagtggtttttcaataaaaaaatcaattccatgttgatatgcacttgttttaacagaaggcagaattgcttgagcagtcataatgaagtgtggataatgatgactgtcctgaattttttgaataagttgaactccatccattgctggcattgcataatcgataaacatgatatcaattcctaggcgcattgcatcgtcataggcctgttgcgggttagaagttgttccgacgacagtattgttgaaatcattttcaataatattggataataaatgaataattttactatcattatctaaaatataaaaattcatgtattttcaccgatttcttgatgttgtttgaagtattttgaaacactatttaattttactctttgtgaagataatagacaatagagttgctgttttacaaatgtgtagctgtttccgcttacatccttgtgaataaagagattgctgcaaaaaaacgctgaatttttctgttatttatggagcctttttgaagtattatgaaactttagcctattatagtacttgtattaaaaccttaggaggaaataaaaatggcttttaatttacgtaatcgtagtttcttaactcttgcagattttaacactcgggaaatggaatacatgcttgatcttgctgaagatttaaagaaggcaaaatatgctggttatgaaggcaagaatcttgaaggtaagaacattgctttaatttttgaaaagagttctactcgtactcgttgttcttttgaagttggtgctaaggatgaaggtgctcatgtaacttaccttggcccatcaggttcgcacatcggtcacaaggaatctgttaaggatactgcacgagttcttggtggaatgtttgatggtatcgaataccgtggattctcacaacgcaatgttgaaattttagctaagtactctggtgtaccagtttggaatggtttaactgacgaagaccacccaacacaagtacttgctgacttcttaaccgctcacgaagtattgaagaagccttacaaggacatcaagtttgcctttgtaggtgacggtcaagacaatgtttcaaatgcattgatgcttggtgccgctgtaatggggatggaataccacgttgttactcctaaggaattggaaccaactaaggaaactctagataaggctaatgaaattgctgccaagactggtgctaagattgttgttactaatgacatcaaagaaggtgtcaaaggtatggacgtaatctatgctgatgtttgggtatcaatgggtgaatctgatgatatgtgggaaaagcggatcaaccttcttaagccttaccaagtaacaatggatgttatgaaggctactgaaaaccctaatgttctctttgaacactgtcttcctgcattccacaacctcgacactgaagttggtaaggaaattgaaaagaagtttggcttaaaggaaatggaagttactgacgaagtattcgaaagtgaacattcagttgtcttccgtgaagccgaaaaccggatgcacactatcaaggctgtaatggttgcaactttgggtgaacaaaactaattaggaggcatttgccatggctaaagtagtcgttgctttagggggaaatgcattaggcaaatcacctgaagaacaattaaagttagtaaagaatactgcttcctcattaattgggctcattgctgcagggaatcaagtagttattagccacggtaatggtccacaagtgggtgccattaatttagggatgaattttgctgctgaacacggtaaaactgctgcttttcctttcccagaatgtggcgcaatgagtcaaggttatattggctaccatttgcaacaaagtttagaaaatgaattacaccgtcgttggatgaataagagtgtggcaacgattgtaacgcaaattgcagttgaccctaatgatcctgcttttgaaaatccatcaaagccggttggcgacttctacactaaaaaacaagctgatgaaattgccaaagaaaagggctacacttttaaagaagatgcgggccgtggataccgtcaagttgttccctctccactaccgatgaagattatggaacttgatagcatcaaaacattgattgacgctgacaagcttgttattgccggtggtggtggtggtgtacctgtaatcatcactgataaaggacttgaaggagttccagcggttattgataaggaccgttcaagtgccttgctagctgacaagatcaatgctgataagttaattattttaactgccgttgatcatgtttatgttaactatggaaagccggatgaaaaagctcttaagacgttaaacgttgcagaagctcagaaatacatgaaggaaggacagtttgctgctggtagtatgctacctaagattgaagcatgtctttcatttgttgaaggtcatccagaacgagaagcattaattacttcattagatggtcttgatgatgctcttaccggtaaagtcgggacagttattcgtgataactaaaaagaagatggttaggaaaataaaatcctggccaccttctttttttagctactctttaattttttctgtggaatgcgaatgttaatcgcaagtactgcaacgataactaaaatcgaaccaagaatatctgctcccgtcatttgtaaatgaaaaatcaggactgaaccaattgttgctgataaaggttcaaatgcatccattaaactaaatgtagttgcatcgatatattttaatgaattattagctagctgaaagggaattaaggtcccaattactagaatgcctaacacatataaccaaactgaaggaacgttaggaatatgtggttgactagggtgaataagtactaaggttaatccggcaaataatagcccccaccccgtaataattaatgagggaactcgacctttgcgaagcatgttttgtggaattaaggtgtttgttgcaacaccaattgcagaaattaatccccatattaaaacactaagcgtcattgctaaatggttaaattggccatgagttgcgataataaaaacacctaaaaaggcgataattgcactaataatttcaattcgtcgcggtggcaggtgtcgaaacacagcttgataagcaatgataaaaaagggcccgataaattgaaggatggttgcgatcgaagcattcccatattggacagccataaaataagcatattgaaccgggactaacccaaaaacaccatatgcaaagataatccatgcagagtgaagatccttaaaaatttgaaagggatgctccccacgaatttggcttaataagactaaaataattccagctgaaaccattcgaacctgcgttaaccacattgatgtaattgaactactaacattaaaaagggccttcgcaaaaagccctgaaataccccaaaaggtacaggcagtaataatcatcgctgtacctaaaacttttttatttgacataaaaatactctttccaattagatttgctattttattttatagatttgctattttattttatagatttgctattttattttaccataccaattctgtgaagagtgagctcgaccttttaattatgactatctgttggaattgttttcagcgatgattggttgtggagttcgtgaatataaagccttcacagcctctatgtctcgtgattgaatgggataatatgatccagctggctgcatcacagaaatcttgttcgtgtgctgtagaccaattgcatgccctaattcatgctcagcagtatttacgattcgttcttgtgagtagccaaaggcaggatttaataggtagtaagaatttagctctactgttgcgtgcagataatatccagttgcggaattcatgcttgtattggtaagccccgctgccccattatttggatcattaacagcggaaacactaatatttgcattcttatcattaacgattttaaatgtgaatgacttcgtgttattccattgggcaattgcggtgtctgttgcattctttaatactggattactgatattaacatagatcgttgcagagttttgttcccagcgtgcatcagcgggtgtatcttgtgccccagtttgttggtcagcattttgtttagttggggttgcaacttctttgccggttattcggtgtagccacgattgagtaagcacctgagcattatgaatgccaatattaaattgttcttgaaaggtagaattattttgataaaaccaaataattccgccaaagagtaataaataaaataaggttaataagaaattggacttcttaatcggtcacacccccctagtatttaaattctaattaaaaaagagtaaaacgtccattatttaatatttttttattgttgacaactgtaaactttgatagtatgctgtacctataatataattacaattgtaaactaaaagaaggtggaaatattgagaattgccgttataattattgccctacttttgattgcatttattgtttggtggttcttcggaaagcatacagagtcggcgggaaaatcaactattgttaatgatgaacaaactgcaacgattgtcgttaatggtggttattctccatcaaccgttaccttgaaaaagggaattccggctcaagttaactttgatatgcatgactcgacggcttgtttatcacatgtagtatttgaacagctaggagttaataaggacttaacaaagcaaaagattacgacgattaatattccaacagataaagcccagacttttaattttgcttgtggaatggatatgtttcatggaaaggttgttgtaaagtaatgaagctcacaaacattcagcgattttggatttcatttgtattatcaattccaatgttaatacaaatgcttgcgatgccttttcactggatgatgcctgcctataattggatagcattaattactactactattattatggcaatttcagcatttccatattggaaaagtgcgatcgctgcatttaagaaacatagtgcaaatatgaataccctagttgccacaggaacagctgtcgcttatttttatagtatttttgcaatgataactgatagggcagtttattttgaaagtgctgcttttgttactgtctttgttttactgggggatgcgatggaagagaaaatgcataacaatgcttccaatgctcttggtaagttgatgggccttcaagcaaaagatgctgaagtcttaaaagatggcaaatttgtcaaagtaccactcgatcaagttcaagttggcgaccttattcgggtcaagccaggtgaaaaagtacccgtagacggaacaattctggaaggggtaacttctctggatgagtcgatggttactggtgaaagtatgccggtaatgaaaaaagttggcgatactgttgttggttcaacaattaataataatgggacgattacttttaaagccacaaaggttggagcggatacaatgcttgcacaaattgttgacctagtaaaaaaagcgcaaaccagtcatgctcctatccagaacttaacagataagatttcaaatgtgtttgtcccagcagtaatgattattgctattttgacatttatgatttggtattcctttgttggcgcaacatttgttcaagcattattatttgctgtttcagtaattgtcattgcctgtccatgcgcattaggtttagcaactccaacagcattaatggttggtactgcaagaagtgctaagatgggtgtccttattaagaatggtgaagttcttcaagaagtaagtaatattgatactgttgtgtttgataaaacagggacaattacggtcggcaaaccagttgtaactgatattgttggcgatgctaaaaaagtattaacaatagctgctagtcttgaggaatcgtctgagcacccgttggcatctgcaattcttcaaaaggcaaaaaataaagagatctcaccagtaaaggtagataaatttgaagcaattgaaggtaaaggtgtgcgtgcagattataatgggcaagtagcatttgttggtagcaatcggcttttggttgatgtaaatatttcccgggaaatggcatcacgtgcagaaaaattacagaacgaagctaaaacagttgtttatgttggtcttgatggggaaataatcggcttagttgccattcaagatgttccgaagtcgagttcaaaagatgcaattgcggagctaaaagcacgtggattaatgactgtgatgttaactggtgataataaacgggtagctcaagcaatagctgatgaagttggtatcgatagggtaattgctgaagtaatgccgaatgacaaagctcaacaaattaaggaacttcaggacaagggtaaaaaagttgcttttgttggtgatggaattaatgatgcccctgctttgtcgacagctgatgttggaattgcaatgggatctggaactgatatcgcaattgactctggtggaatcgttctcgttcaaaacgatttgcgaggagttgtccgggcacttgatacttctaagaagacctttaaccggattaaattaaatctcttctgggcgctcatttacaatgtcattggtattccaatcgctgcagggctatttgcatttgtgggctttacgcttagtccggagcttgccggcctagcaatggcctttagttctgtttctgttgttagttcttctctgctgttaaataaaactaagattgcgggagaccatgttgttcaggcttaaactaagattataaggagttaagaaatataattcttagcttctttttgttatattctgcacaaagtaaaaggattttgcggtaaaatattaataaaaatgatggaggagtatttaaaatggcagctgcatttttagttcatactcgattaagctggggaaaaacgtgcgattatttaattgctaatgatgttgagccggggttaatgcatcgttatgagacacgagaagattggcaaggggttattcttgatgcattgatcaatgttcctttagcgccgtatttgccaagtggtcagcctattccgccaattggaacggcaaaagtaataggggtagaagcagttgatccgtcacaggttaaaaaaaatgtgcaacggacacgaagtcaatttataatggcaaccatttggaaaaagcaatcggccttaaaaaactataatttcttacatcatgattatgacaaatggacgcaaaagcaaatttgggccgatattgattactggtgtaattctaaaaaacatcccattatcgatttaattacaaaatggcgttgcacccgtcaacaccaacgattacgtgctgaagagaaatgataaaaaaagagttgactattaagctacttccatgtatagtatatatcgttgtaagtttaatttattgggcattcgccaaactggtaaggcagtggactctgaatccataatttactggttcgagaccagtatgcccaacttctaacaaaagacctgctagctaatctagcaggtcttttgttgataaggaagttatttgttataattacagtcaagtgaggggacgaatatggctagtaattctgattcaatttattatgttttgacaaaactaaagcatcatccagagttaattaaaagcattagaccacgttatactaatacggttatggttctttttgatgattccttaaagatagcggatgcttcattttattttcccgttgatcgtttcatggtcaatcgtttgtcaaatgattttgtggcaaagaatggtgaccttcttgatagctatttttcgatgaccaatggaacgaagaaaaattaccatgatgtttgggcgaccacctgtcatattccagaagagaaagtatatttattagaattatcatttgaataacgcaatgtaagctgcgacaaaagatgtcacagcttatttgttataaagggagagttttgtagtgcttgtttcaacgattgttttaacggtagcggcagttttaagtagtattatttccagcttttttccgcacttttcaattaattatattagtattttcgtcggcttaattattggcttagttcccttttttaatagtcgtgttgctcctttccacacagaagtattcatgtatatagtagctccattgatttattttaaggggcaatcaacgagaataaatttaattggaaaaaggttgcgacaaatctttgaaacggctgtcctcttagtgattgtaggaacaatatttgcaggttttactgtatcgcttttagaaattccactggcactagcatttctgatgggtgccttaagtactccgaccgatgctactgcaactgaatcagtttcagaaggtttaattgttcctgaaagacaagaaaatcttttaaaaatggagttattatttaatgatgcttctgggattatcttagtaactgcaatggcactgtgggtgaaaaacggtcagttcaactatcaacaaacattttttgactttttgcgttcagctggtggcgggataattattggcattttggcagcccttgtaatgatcagttttcgtcaatttttggggcgaattaaccatgatgcttataatgcgcaaatattattatttgttagtacgccattctttatttactttatagctgaagaattagaagtatctgggattattgccgtagtttgcgctggtttaatgcagaatagcgaaagtgtccgaagtcgttttataacaccccgccaattttataatgggctagtacttttaaaattgattcgggagctcttaaataataccgtcttcgttattttggtagtattggttgtcagaatcattcgtgatgacttaattattgggaatacaaattcacaatggattgtgattggaattttactctatcttactaatctccttgttcgttatttctatggactattatcaaagatgggtaataaaggaagtataatttttgctctgggggagtccatggagcagtaacactagccttagtatatatgattattgacaatgttagctcagcacaatttgacatgattgtgttagcagaaatgcttgttattattttgagtatggtggtgccttcaatcgtatttcgctttattcttgatcatgatatgtcaagtaaggagacgggaaaacagattcagcgtttacggcaagaaatggttaaagaaggcttgagagccgtggaaaagatataccttccagaaaacattcgagaaagtgtcgtttatgattcacgggatcaaaagagtgctaattcattcgcagacttttggcaccaatgggctaaagcaagtcgctatccagagttcaatgagcaggaaaaggaactggaacaacgagcattattatgggcattccgggctgaaagacaatatcttaatatggtatctcaaaaggaaaatcgtcgcgactatctttttgagctttacaatgaaattctattagcagaatcgattttgcttgacactgaaaatgaatattaaattaatttgattttaagttgacgaaaaattgaaattaacgtatacttttatttgtacgttattgcccgctggtcaaattggttaagacgtcgccctctcaaggcggagttacgggttcgatccccgtgcgggtgaatatgattgagtctgttactcatttggtaacagacttttttatttatattacaaatttagtaaaagcgttaagaaaaggtttaattgatgctatgatggatttgtgtaaatagaaaaagaataggatggatttggtgagttaattatgcgagtaatgaatttaatgatagtattagcagttattgcgattattattttagctgctcaatatttttctcagttacggaaaaaccgcaacggtaataatttcgtaagtgggggccgtgtcttttttaactggacgttggtcgctgtcttggtaatttgtgttgggggaatagtttttggtagcattcattcacatcgccaagaagcaaagccagctcaaactgataagacagaaaatgttgaatatgctgcttccgacagtgataatttgggaaaagtctcagttcagtttgatcggaaagttactttaaatgataatggagaagcaaaagttaagtttaaggtttctccacaaactactttgacaatccggggacataagagcaaagagattgttaagacgtttaaagcaagtaagggcgaatcattagttaaccatacttatacatttgacgtagctggcacttatgatattattgcagaacgcggtgatcaaaaggtgaccaagcagctaaaggttaaggacaatgataatgcccaagaaagttcatcaagtagtagttcagtaagttctagctcttcttcagttgcttcctcagcaagtagcacagtttcctcgtcttcaagctcgactgcttccactgcgcaaagtaacagtgaaagttcaagcagcacgacagcagcttcatcgaataacggaggaacttcaagaagctacaatacttctcgtccacgatatagtggcaatggcggtggaaataggacctctggtagcagtaccccgactgctcctgcgcaagaaccaagtactcctgcctatagtcaagaaaacaatggctatgttagcgatggcccacaataataatttttattcgtaatcaaatatctaatgataaaagaataaactgctttcaaaggaacaaaagatgatttttttatatgaaaaattattcttttgttcttttttattatcactaataacgtaaaatcgttgatatatcaagaatgaaaagcaaaaaatactgagaggtatattcctaaacaatttatcagtattgaaataagaatgaagtatattatactcgatattaaataatagttatcgaattataaaagtatttaagggagggagaaaaaagatgcttgatacagatgagatcaaaaaaatgaggtacttggtgttgagcttgccccggttgaaactgttggcggacaagtgaaattaggggagaaatctgcttcaagcgttgcttcactcaatagaacgccattattggaaaaaatgcttaaagcggtgccaaattttgcggctcaacaacaaaaattgaacggccaagaaccggtaataaaaaataatccagcattaggtgaatatcaactaattgatgatttaggtggcttaatgcatgggacttacttacaggcaactaatagtgaaagtcaggataaagatcgttcgcttgttagtcgtaattcaacgagtgaaacggcatcattagttaattatcgcgcagctactgattttagtggatatggtcatttgaaaaataatacagaaactaccaaatcagttgaagttgtctatacgctgcctacatttgaagggaaacaaggaacggtacaaattgtacttgatggggcgcggattaatgaatttgacggtcttgaatataaggatgaaaagggaaatgtaattcctggatttgatattacctatagttgccaaggacacgaaggagagtattcaacgattgatactcttaagcagcgtgatgattttagctgggaaaaggtaacagcggttatggtatttggttccttattgccaaacagttcttaccgtgttgaatttccttttaagattacaaatctagaaaatattaatactcaagagcaatttaatttaaatgaatatgccttttatgatttaacagttaataagcatacaacgtcacaattaaacttccgcttaagtacgcctgttttttgcccatgatgcctattaaaatatctcattcatggcattcagccgaactgaagatggtgatgaggtatttccagaagatgttcaagcaatgatgccaactttgggtgaagtaccatatgcgatcagtaactttaacgatgaaatttcatttgagactgatggagataatgtaatgtggcaaggcggtcaatacttctttaagctggccgctattcaaggtgcgattcaagaaaagggattttcagtcaatgttgataagacagggagaaagttaatggaggcctctgcctttatggttcaacctacttatcttgattttgaaagttttgacttcattccttatgttgtcattcaccaactttttattactaaatcatttacgcttaaggcagaggcaaaagatgattggaattcatttggcgggattgaaaaagtttgtggtctctccgcaactaatgaggaacttccggttagtcctgagcaaacatttattgtggatgattctgaattagtcgatgcaacccctagtgattataatgtcattattggttatttccttaacgggagtgaggacaatgatatgttaatcatttcactggcaaaggtaaggatggttgaaaataaacagacaattaatgtttactatgttgacttggttaatatccctgataaaaccaaagatgatttacaaccaagtggcggaaagattctcgaaaatcaaacccaaacttttaccggccaaggtgatgaagattatcataatgaactctggggtgaagaaaacggctttgagatttatgaatatgaccaaggtgctaaattaaggacctatgtcggtagacaaccagctaaagattattatgtttatcttattcataaaattgaaaaaatcaatgaagatcatcaagtaacacgaacaattacttttaatatgccagatggatccaagcagatcattaagcaaactggaaaaattcagcgttttggaattactgataaaacgactaatgaaaaaacatggagtgattggagtaaagctactctccccgcagttaccgcaccccatgttcctggatatacgggtaaaaacgttgatgctgaaccaatttcattaatgtcaaaagatagcaatattaatgttatctaccatccaaagcaagttagtgtcaagattaaatatgttgatgaagctgggaatgtaattgatgagcaaatagtttctggacttgctgacgacttgatcagtcataagccaacagttgaaactgaccgtcttgctgatgaaggttacgtgattgttaataatgaattgccacaaaatgctcgcttaatagccgaagacagtgatcaagaaaaagaatataaggttattattagtaaacaagatttacagacacaacaaattaccgtcttttatgttgatgtccctgataatcgattaccaattgtcaagccttcttctgggcggattattgataatcggacccaaagattaaatgttacagaaggacaaacatatagtaatgaactatggaattttgaagatgacgggtatgaattgtttaaggctgacaaaggggcattaaaggggaagtactttgctggtagtctggaacaacaatattatgtttacctcactcaccaaactactcccctaaaaaaggaacatcacgtaacgcgaacgattcagattacaatgcctgataaaacacaacaagttgtaactcaggaagcaattgctactcgttttggcgttcatgatgaagtgcttggtagtgacatttggcaagagtggagcaaaggagtgattcctgaatatattccaacaccaatcgcggggtatgatgcatctgctattccagctgaacaggttgatgaaaatgcgagcgatcgaaatgaaaagatcagttacactccacaaccagctaaaattttggttaaatttattgaccaaactggtgcaggattaacatccgaggaacttactggggtaaccggtgaagaatttaactacgatccaactccgcaaattaagtcatttgaagatgagggatatgtgcttgatgaaaatagtttccctgctgatcatcattttacagctggggaacagacctatactattactttaaataaattagtagcagtaacccctcatggtaatagtgaggcagaatcaacaatcgaacaaattaagtcgaacgatgatgataaaactggaaataaaaagggaatctttgctgcatttaaaggctattttaaataaatgaattaataaaggagtacaggaggaataaaccgctaatggtaaattccttctgtactcctttttgagttaaaaatattaattatcataattgccggtgattgggttcatttcatggatttgatttgtagcggggtcatattgatagataccagtaaggtgagctatatttggatcgccgccttggttattgcgaacttcaatttgataattattattttgattattcttagtcatgtaataatgattgccatcttgttgaacaccacttgtcttgacaaaactcgttaggacttgttgatcgttttgtgctgaggaagtggaattggtagttgctgattggctgctagaactactagttatggatgaactaggagcttttaccgtttgattagttgatttttctgaactgttagctacctttgagtttacgcttgttgagcttgtatttgttgaagaagtggactgtacactagtaggtgcagaggtttgctcctttgccttttcgctattagtggaggaggccgcctttttacttgtttgttgacttacttttgtcgcagaagtagatgtctttgttggagctgctgcgctattggtacacccagctagtccaagggctgctaaaattactaatgaacttgttaaaactttatttgtcatcttcatcattttaatgaccccctcaatctctcttatttttataacatcattacacctatattataccgccttttgaaatgattttgtaacatttttgacttatttgtcataattgactgattttgtttaataaatttctggatatttttcctttgtctgatttacgttaaaataaaccttattgaggaagtgaattaaaatgatgaataaatacgatttaacaattactaaattacaccaaatggttaaagagggagttgttccaggagttagctatttgatttttgatcatcaacatacgattaaggaagtaacagggatggcccaaatttatcccgagactgaaatattaaaaccaggcatgctctatgatattgcttcactaacgaaagtgataggaacagttccggttattgcccagcttattcagaaaggaacattgtctttagatgatccggtaaagaagttcttaccagaatttaatgatgaccaaccaactattcgcaatcttcttacccatacttctgggattactggttatattccccatcgtaatgagttgactgcctccaaactaaagaatgcttttttgacgaaaatgtatgtggaggatagcttgaaccgccaaatcaaatatgcggatgtaaactatttgtatttaggatggattattgaacgaatttataatcaaccagttcaaaaggttattacagaacaggtccttaaaccattaaatatgccaactgcgacatttaggcctcaaccagctaactgtgtaccaacagaagtacaagaaaaacggggcttaattagaggagaaactcacgatcctaaagggtatattttgggagaaagttgtggatgtgctggcctctttgcatcgttgaaagatttagaggtctttagtcacgcacttattgaaaataatttaaaaggtcttcttacttctgaaacaactgatcttctttttacagatcaaacacgaattcctggtccacatagtcgctctcttggatggaaactgtttcacgctaaagaccaccaccttttgattagtcacactggatttacgggaacttggatggtattagatcgtcaaactgaccaaggctttattgtattgacaaatcgcgtccatcccagtgctaaaaatcaagaatatttagatgctcgtgaccaactttttgcaatttatttaaaagaaaaagaaaaaactttgtgaaatttatatgcagtcaattgaataaccgctttcacagaatatgcgctttaggggtaagaaatgtataaaaactgtcgataatttatattaataacttctttttatatgattcactaaatattgatttgacggcatttgacaacgtttacataaactaatatgatgtagttgtagtcaagtgatacttcaaaaaggagtgatattgtatgcaaagtccaattcacgttacatcagaaattggaaagcttaagacagttatgttgcatcgaccaggtaaggaaatcgaaaatgtttatcctgaaattcttcaccggatgctcgtagatgacattccatacttaccgatcgctcaagaagaacatgaccttttcgcccaaacgttacgcgataatggcgctgaggtattgtatcttgaagatttattaacagacgcactagcagatgataatatcaaagaagaattccttgaaaagatcattgctgaatccggttatgctgctggagcaatccatgacggcttaaaggaattcttacttagtttcagtactaaggacatggttaacaagattattgctggtgtacgtaaagatgagattaaaactaagtatgcttctcttacagaattagcagaagatagggattacccattctatatggatccaatgccaaatgcatactttactcgtgaccaacaggcatgtatcggggatggaattaccattaatcacatgacctttaaggcacgccaacgtgaatctctctttactgagtacatcattaagcacaataagcgttttgctgacaaaggtgttgaagtatggcgaaaccgttatcctgaaggccggattgaaggtggagatgaattagttctcagcgatcatgtattagcaattggtatttctcaacgaacatctgcaaaggctattacagaattagctgaaagtctcttcgaaaagtctgattatgatacagtaattgctatccatattcctcacaatcacgcaatgatgcaccttgatactgtgtttacaatgattaactatgatcaatttacagttcatccagcaatcttacatgatggcggacatgttgatgcatacattatgcacccaggtaataatggtgaaatttcaattactcatgaaacaaatcttaaagaaattttgaagaaggcacttgataagccggaaattgatttgattcctactggtggcggtgacccaattattgccccacgtgaacagtggaatgacggttctaacacgctagcaattgcccctggtgtagttgtaacttatgatcggaactatgtctcaaacgatttgctgcgtaagcatggtattctcgttcacgaggttcgttcaagcgaattatcacggggtcgtggtggtccacggtgcatgtcatgtccaattgttcgtgaagatctcaagaaataaataagataataaaagcagcaaatttatctgagtaatctagaaagggtataattttactgctttttcttgtatcattttagtgtaattaacatgataagaagggaacacgaatggatcgaaaggcaagaagaaaatatattgaacaagtggttaatgatcgtaaaattgagacacaagaagaattgcttaagctgttaactgaggcgggtttcgaaacaacacaagcaacaatttcaagagatattcatgcgttgaatattgttaaagcaaatgatggcgatggtcatacccattatgttcaacttcatgtgacgcccgaacataattttgagcgcttatatcaagggattcatgataatgtgcggacaattgaaactgttcaatttatgaacgtaatcaaaaccgcactaaattctagctatgcgacgattttggctggaatgtttgatgaacttgatattccggaagttgtgggcacacttgctggaaacgacaccttgattatcatcagtaaagataatgatgatgctaaaatggtctatgacttaatcattcaacatatgcattcataaactgcataggagggatatttatggatgaacaaaagaaaggtattggtagaggcgaattaatcgccttaattgtaagctcatgtatcggtaccggaatatttggtatcactagtgatgtagcggcagcggcagcgccaggacctgcattattggcctggatctttgttggaattggctttttaatgctggttctctcgctaaataatttatccgaaaagcgaccagatcttacttcagggattttctcatacgctggtgccggctttggaccattaggtgaatttatttctggatggtcttactggttatccgcatggctgggaaacattgcttttgccaccatgttgatgagctcgattggaacgttctttccaacatttaaaggtggtcaaaacttaccctcaattattattgccatcatcttctgttggctattgacaatcttagttaacaatggtgttgaaagtgcatcctttgttaacatgattgggacaatctgcaaggtcttaccattggttatctttattataatgatggttgtttgctttaaagccgggatgtttacagcagatttctggggacgggttgctaataatgcttctcgcggtaccacaactggttctgtttgggaacaaatgaaaggtaccctaatgacattaatttgggtatttatcggtgttgaaggtgcctctgttatggcaagtcgtgctaagtcacttacagccgctcgtgaagcttctcttattagttttggccttttagtagttatttatgtattgatttcgattttgccttatggtgcattaactcgggcagaattagctggaatgggtcaaccagctattggtcatgttcttcaagcaactgttggtagttggggctcgattttaatcaatgttggtttaatcatctcaacaattgtttcctggctttcttggacaatgcttccagccgaaacaacgatgttagttgccgatgataaagcaatgccaaagctttggggaaaggttaatgctaaaaaggcaccaactgcttccttgatgattacagcggtattgcaaacaatcttcttgttctcgttgcttttcactgataaagcctatgaattcgcatattccttatgtagtgcagcaattttattctcatacttatttgttggactttaccaaatgaaatacagttctgcacaccaagaatggggacaatttacaattggtttgctctcggctgcatttatgttcgcatgtatgttccttgctggatggcaagaagtattattagtttcaattagttttattcctggattctacatttactacttagcatgtaaagaaaatgatcgtaaagttacaactgctgaaaagtggacaatggcgctgattttaatcctaagtatcattgcaatttggcttgttgctaatggaactattgccattagctaggtaaataatgtataattattccacattttaagaatatttataagtgaggtgattaaggtgaaggaaaagaagttaaatctcttcctcttaatcaccttaattgtaggaacgattattggtggtgggatttttaatagtccaaccgatttgattttgaaagcaaatccaatggctgcgttaattgcatggttaattggtggcttcggaattttgatgttagtattagtcttctacaagctttctgttgtcaaaccggagatgaacggtggaatttatacttatgcaaaggaaggctttggcaactatattggttttaactccttttggggatattggatgggagcagtttttggtaacattgcttttatctcgctcttttttaagaccttaaatagtatgatcgggacgcatcaactttcgccattaatgtgttttatcgggggctcaattattctgtggggatacactgcgattacatggtttggtgtccgcgaggcaagtattctcaatgccattattacgattattaagatcttaccgcttttattagttgttattgttggtgtttttgcatttcagccgcatgtttttaatgttcctgattggacaagcattcttgctgttaatcaaacgcatgtcccatttaaagaccaaattagtggtgcgatgagtactattgtgtggtgttttgttgggattgaagcagctgtttcaatgtcacgtcgggcaaagcagccacgtgatgttggattagcaacgattattagctttgtaattgtattggtcctctatatttcaatctctattattccaatggggattctacctgctaaagaacttagtcagacttcagttccactggcagcagcccttagtcatacagcattaggaatagtgggaagccttattattaaaattggcttactgatttctctattaggagcattattgagttggtttatgattggaccagaaattgcatatgtaaccagttatgatcgggatatgccgcgagcatttaaacttgttaatcgccatggtgttcctgggtttgcattaattgtatatacaattattatgcaagtatgtttactagttttactgcttccacagcttcaaatggcctatacaattgcatatactttagctgcgacgatgaccttagttgcttacctgctctctgcgttatatgggttgaaattagcaattagcgaaaaaatgggccttggctttaagattattgctacgttagcttctctttattccgtctatatgttagttgcttcgggacttgaatatgtatttgcaagtgcgattatttttgcgctaggaataccattatttgccagggctcctaataaaatgagtaagaaagaaaagtggttagcaacaattatcgccttagcagctgtgattgcgctgatgctgattattactggaaagattaatttttaaaaaattaaaagggatgaggttagaaggaatttttactttccttcaatctcatccttttttgtattctaatcttcgctagtcatcttacttttcatgttatccattcgccagacaacataggtttcaatcaatgtgattaggcttacccataaaatcgtgaaatttgatgaagtaagaaatagtaagatgattaggatccaagatatccagttccaacgacgctcaagacgaataacttttgcaaagcgtggtgggattctagttggattttgaatggctagtgcttgtagttgggagaaaagacggacttcacaaaaactttctagcaaaaaaataatggtaaatacaaatgttatggtttggttcactgtttgtcaccttaattaaaatgtaggtttaatttttagggctttttgactgcttaagtcggcatcggggtatttatgctcaagagctgctaaaagaatctttttagcaatctcaccatttcttgtaagaatgggaccgtggaaataagagcaataagtgtttttatagattgctccttcggtatgatcttcaccgttatttccattaccagaaattactttaccaagcggacgctcaccttttcctaagaatgtgcggccgttgtgattttcaaaaccatggtactcttgattgctttcttcgtttttgatggtgatatcaccaatgaaacggtgattatcctggcttaaagtatagtgatcaaggatgccaagccccggaatcttttcgccatcagcaccgatataatagtggccgagaagttgataacctccacaaatagcaagcagcggctttccatcattaataaacttgtcaatgcctgcttttttgtttggaagatctttggagacaacaagttgttcgtaatcttgtccaccgccgaaaagagctaaatcaaaatcttgtggattaaagtcgttgtcgatactaatgactttgacattaatatcggtatccatctgtttagcgtaatattgaagggcgataatattaccgacatcactataagtatttaataaatcgccgtagaggtgggcgaggtgtaagtgatattttgccattagtccattcctcctttaatatagcccttttctgctagttgtttgcgtaattgcagaacggctgtatatgttgccagaatatagacatgttcagttggcatttccttgattttatcaattacctgggtaaggtctggttcatgccacatatcttttacgccggccattgttaatctagtggtaatatctttatagcgttctcctcccgtcatgtattgtgggatttgatgttgggtaagtttttcaaagtcgccgtcccagatccagctagtatcaattccatcagcatagttagcatttagtaagaaggcaaagctaaagggctcgtcatctgtctcaatcatatctaaaacctgattaagaccaactggatttttaactaagatcaaagtaacttgttttccatcgatattaatgacttcttggcggccaaaaactcgttcgtctgattcaaaagcatctttaatttgtgcttggctcactccgagaaaacgaccaagagagtaagcggcaagagcattatagatgttatataaaccaccgattccgatggtgtatttttgcccatcaatttcaaaagttgaatgcgtgggggtaagcttatcaattttggtaacagcatacgttaattctggtcgatggaaaccacaatttggacagaagtagttacctagcccggcataagttcgcatttgatactttagaatgtgttgacatttaggacaaaggagaccatcagtgttagctggggcgttgaaaggctctttttcttcgtggttaaagccataatagatgattgggttaggcaagtctttgctgttaaagagctgttcatccccgttagcgatgatggttgcttttggtgctaatttaaccccctttaagatcttgttataagtggtgtagatttcaccgtaacgatccatttgatcacggaaaatgttggtgaagacaaaggcaattggggtgatgtatttacatactttaactacatttgcttcatcgacttcgaggacggccagcccttttttctttggatagggagccgtaataaaggtagttacgattccttgctccatgttggaaccagtcggattagtaagaacttggtcatacttttcccgtaaaactcgtacgcttaatgcggtggttaatgtttttccatttgtccctgttacaataacaaggtcgtactttttgctaaaggcttggagaatatttggatcaagctttaaggttaattttcctggaagggaacttcctccgttcataaaagtatggaggaaccaatagcttgaccgcccggcaaattcggcaaatgaacttcgaactgtcatgaatatatgtattcctttcgtgtcaattgtaagtgatacaatagtgatgattaaaattaccgtttaattctaaactttacgataacaaaaagaaagttattaaactgaaattattataagattaaagttattcaatgtaaaaaactctttcctaatgtggaagtatttaaatgacacaaatttttggatataatgaagagtactatgcaaacaaaaaggagcaattgtagtggcacaactattctttaaatatggcgcgatgaattctggtaagtcaatcgatattttgaaggttgctcataactatgaagaacaagggaaaccggttgttttaatgacgagtggtgttgacgatcgttctggtcgaggcatcattgctagtcggattggcctagagcgtaaagtaaaaccaattatggatgataccaatatttacgattatgttaataagatggaccgtaagatatattgtgtattgatcgacgaagcacagtttttaaagaaagagcatgtcttacaattaatcaaaattgttgatgagctaaatattccggtaatggcttttggactaaagaatgactttcggaatgaattatttgaaggttcaaaatatttactgatttatgctgacaaaattgaagagatgaaaacaatttgttggttctgccctcataaagctacaatgaatttacggattcataatggcaagccagtatatgagggagaacaagtccagatagggggaaatgaatcatattacccagtatgccggaagcactattttcatccccaattaaaacaataggaggaataatcaagaatggaaatggaagaaattttcgataagcttcaagcagttgctgatcgttacgatgaactaaatgaattgatcagtgatccagaagtaattgccgactcgcaacgttttatgaagctttcaaaagaagaaggaagcttacgtgaaacagttgaaaaatataatcaatataaaaaagtcacccaaacgattagtgatgatgaagaactattgcgtgaaacaaatgatgatgacttaacagccttaaccaaggaagagttagcggaagcgcgcgaagaacaagcacaattagaaaaagagcttgaagttctactaattcctaaagaccctaatgatgataaaaacattatcatggaaatccgtggagctgccggaggggatgaagcaagcctctttgctgctgatctatataacatgtaccttcgttatgctgaaaagcaaggctggaaagtagaagttgtggatcgaaatgaaactgaagtcggtggctttaaggaaattgccttaatgattactggggataaggtttattctaagcttaagtttgaaaacggtgcgcatcgtgttcaacgggttcctgttactgaatctgctggacgtgtccatacgtcaactgcgacggttggggtaatgccagaagctgaagatgtggatgtagatatcgatcctaaagatatccgggttgatgtttaccgttcaagcggtgctggtggtcagcacgttaacaaaacttcatcagctgttcgaatgacccacttgccaacagggattgttgttgcaatgcaagatgagcgttcacaacagcagaaccgggctaaggcaatgcggattttgaagtcacgggtttatgattattaccaacaacaagaacagagcgcctatgatcaaaagcggaaagacgcgatcgggacaggtgatcggtcagaacggattcgtacttacaactacccacaaaaccgggtaacagatcaccgtattggattaacattaaataagcttgataagattatggctggtgacctcgatgaaattattgaagcattgattgttgccgaccaaacgcaaaagttggagcaattacgaaatgagtagtttcgtaccgaccaactactttatggctcagcgatgggcaaaagaacaattacaaggaacaaatattgacccaagtgcccctcagtttttacttcagcaatcacatggttgggatgcgactcacttacttttgcataatcgtgatgagatgccagctgacgaagtagactggtggaaggatgccataacaagattgcttaatcatgagcctgctcaatatattgttgggcaggccccattttatggacgaacttttaaagttaataaaaatgttttgattccagaagctgagacagcagagttaatcgattgggtgttgcaagaaatgccatctcgcccattaagaatccttgatttaggaacggggagtggagtgataggcattacccttgcacttgaacggccaaattggcatgtaagtttaagtgatatttcaaccgctgcgcttgctattgctcaggaaaatatggctaagtttaacttggagttgccgttaattaaaagcgatttatttgaaaatattgatcagcaatatgatttaattgtgactaatccgccttatattgacccagacgatactgatgaaattgatcaagcggtccttgaaaacgaaccagccctagccctatttgctagtgaacatgggttaggattctatcatcgcttatttaagcaagcagggcaatacctaactacaactggtcaaatatttggcgaaactggttatgatcaagaggagtcaattcaagaattactacatcaaaccgatgaacacgcacagatatgcccacgacatgatgtggcaggaaaaatgaggatgatacacgcatgggatttttcaaacgtaggaggaagatagtaagaatggatacgaagatttttcgacatggtgagattgcccaagcagcagctgcgattaagcgcggtgaattagtggcttttccaaccgaaactgtttatggattaggggctgatgcgaccaatgaaaaagccgttaagaatgtttatttagcaaaagggcggccaagtgataatccattgattgttcatgttaactccatcgcaatggttaaaaagtatgctgccgagattcctgataatgcccgaaagttgatggatgcattttggcctggttctttaactattatcttgaagattaagaagggcgcactttcaaaaaccgtcacaggtggtttgaaaactgttgcctttcgttaccccgactgtcaaccaacccttgacttaattgaagaagctggtgttccgatggtgggaccatctgctaatacttctgggaaaccaagcccgactactgcccaacacgtttatcatgacttgcatggtaagatctctggaattgtggataatggtccgacacgggtaggagttgaatccactgtccttgatatgtcaacagaccaccctgtaattttacgtcctggtgctgttacgaagaaggacattgaaaaagtgattggatccattgaccttaatcatcataaagtaggcaaaaatgaaactcctaaagcacccggaatgaaatacaagcactatgcacctaaggcccaagtatatattgttgatgaagatactgattgggataaagttgttgaatggatacgacaacagccatttgacgttgggatgatggctgaagaaaaggttctccaacaagaagtattgccgatgaatgctattcaattttcattaggaaaaaatgttcaagatgccagtgctcgtctatttgatggcttacggcaatttgatgaccaacctaatgttaaagcgattgtcactcaagcatttccagctcatgatttagggggcgcatacatgaatcggttaaataagtcggctggtggtatgcactttgataggaatgcggtaaaataataagggaacgtagtggaagaggtaccactccctaattaaaatctcaataaaataataaagagactgagtaggattcccagcctctttatttataaccagaggagatgttgtaaatgaactatggtaaaaaatcaccccaattatgggcagccattgaaaatgaagaacaacgccagcaagatacgattgagctcattgcctccgagaatattgtttcagatgctgttcgtgaagctcaagggtcagttctaacaaataagtatgctgaaggatatcctaataagcggtattacggtggttgtgagtttatagatcaagttgaacaattagcaattgattatgctaaaaagttattcaatgcagcatatgttaatgttcaacctcattccggatcacaagctaatatggcagtttatcaagcacttctcaagcccggagatgtgattttagggatggggatggatgctggtgggcacctaactcacggagcaacggtcaattttagcggaaaactatataagacgtatggctatggcctaaatccagatactgaagagcttgattatgatgaaattatggcgttggctaaaaaagtaaagccacaattaatcattgcgggtgcttctgcctatagtcgaattattgattggcaggcatttcggaagattgctgatgaagttggggcttacttgatggttgatatggcccatattgccggattagtagcaactggtgtccatccaagtccacttccaattgctgatgtcgttactactactactcataaaactcttcggggcccacggggaggaatgatcctctctaaatcgactaaattaggacggaaaattaattcagcagttttccctgggatccaaggcggaccactggaacatgtaattgcggggaaagctcaagcattttatgaagatttgcaaccagaatatacggaatatatccaacaagttgtaaaaaatgctcaagcaatggaaaaagtatttaatactagtaaacaaattaggatggtttcaggaaaaactgaaaatcatcttctcgttctggatcttactaagactggtttaacaggaaaagatgcgcaaaatctccttgaccgtgtctacattacaaccaataaggaggccattccgaatgacccacgaagtccatttattacaagtggtttgcggattgggactcctgctattactagccgcggatttaaggaagaggatgcgcaaaaagttgcggaattaatcagtacagctttaactaatcccaccgatgaagagtgtctacaagaggtcgcaaaaggggtacacgaactaaccacaaattatccgcttaactaaaaaattagaatataaaaagttgttaagatcctttgtcatgacttgatttttttggtagaatagtgaagaaattcaaaggagtgtatataggcatgggtaaatttgaagtgttagatcatccattgattcagcacaagctaacaatgattcgggataaaaatgttgggacaaagtttttccgggaaactgtcaaagaaatttcaactttaatggcttatgaagttgcacgcgatatgccattaaaggatgttgaaattgaaacgccaattgctaaaacgacccagaaagaattggctggtaaaaaggtggcgattattccaattcttcgggccggaatcggaatggttgatgggatgacggaccttatccccgcagctaaaattggttttatcggaatgtaccgggatgaagaaaccttaaagccacatgaatactttgttaagttacctaatgatattacagaacggcaattattcatcgttgacccaatgctggcaactggtggttcagcaatgatggcaatcgaagccttaaagaagcgcggttgctcagaaaagaacatgaaatttgcttgcttagttgcagcccctgaaggagttaaggctgtgcgcgacgcttatccagatgttgatatttatacagcaggacttgatgatcatcttaatgaagatggatatattgttcctgggttaggtgatgctggtgaccgtctttttggtactaagtagataattaagaattaaaagcatgatctgtagaaaactttttagctttcgcaaattttgcttttatttttttgtttgtgttgaaaaggctttcgcttataataggtactataccagaaaaggggaattgattaatggagacccaaattaatggaattgcagccagtgatggagtgggaattgcacctgcttacttattgacgaagcctaatcttagttttgaaaaatatcatattagtgaccccgatagtgaaaaagcgagattgcactatgcttttgagaagatcattcagaaactaaaggaaaccaaaaagaagcttgttaataaacttaatgcagaaaatttggcaatttttgatacccacattgcaatcttaaatgatcctgaaatgattaaacaagttgaaaaccggatcaccaatcaacgcttaaatgcagaatcggcttttgcagaagtaattactaagatgatcaaaacccttcaggcgatgactggaaatgaatatatgcaagagcgggcatctgattttcaaaatattcaagaccaggttttagcagagttagaagggaagaagctccctaatttacgtgaattagatcaccctgtcattgtagtcgcccattcgattggtccggccgatacttcacagatggatggccgctttgttaagggaattattactgatttgggtgggcggactagtcacgcagcgattatggctcgttctttacagattccagcaattgttgggtgtaacgacataaccaaaaaggtgcagaatggccaacgagtaattgttgacggctttgaaggcagtgcaattgttgaaccatcaacaaatgatgttaaacaataccaaaaaattactgataagtttatgaatgtccgtcagcaatggaaaaaaatgattaaccagccctcagtaaccgccgatggtcaacggtacaagatttcagctaatattggttcttcagtggatatttcgtcagcaatagaaaatggtgctgatggtgttggcctatttcgaaccgaatttctttatatgaaaagtgaccaccttccaaccgaagaagagcagtttaatgcttatcgccgagctgttgaacagttaaatgggaaacggttagtggttcggaccttagatatcggtggagataaaccacttcaatttatgcccttacccaaagaaatgaatccattccttgggtaccgggctattcggattactcttgatcgaccagaaatgtttaggactcagctgcgggccttactccgagcatccgagtttgggaagattaatattatgtttccaatgattaccacgcttgaagaattacgagcagctaagaaaatctattatgaggagcagcagaaattagctgttgatcatccaggaattggccgcgatatccatcttgggataatgattgaagttccattagccgcgttaaatgctgatcgcttagctgcagaagttgatttctttagcattggaactaatgacttaatccaatattgttttgcggctgaccgtggtaatgattcagtttcgtacctttaccagccgctaaatccaacttttttaaaattaattaagcacattatcgatgctgggcatgctcataatacaacggtagcgatgtgtggagagatggcaggagatcattatgcgttgccactattaatcgggatgggattggatgtctattcgatgagtgctagttctattttacggacacgttcaatgatgaagcaattagacagcaaaaaatgtcagaaactctaccaacaggctgttacaacttgtgattcaatgaccggtgtgaaaaagttagttcaagattggttggtagcaaactaaaaaggatttaggaaaagtaaagatttttcttaaatcctttttttatctcttgttaagagtaaaatggcaatagttttgctgtactagggggatgtaaagttgtgattaagcaatactggacaaagcaaagaatctggttgttaatttttttaatggttgttggaattggtgctctcttatttaccagccataatgaacagttttatcaacaaccaattgctaaagtaatcagcaaaaaaacgatgagtaaacaaagagtaaaagaccagtttgataatgttgaccatcaatataatcaacaactccaagtaaaactaatgaatggcaaatatcgcgggcaaaaattaacagtccaaaatacatatagcgattcgcaaccgatggatcaacgttatcgggtaggaaatgaagtatttttaacccagcttcgcaaacgaggcggaaaactgaccgccaatgttaacggttataagcgagacacagtaattgtctttttactttggcttgttgtcttgatgctgcttctccttatggggcgttcagggatgtttgcattcttaagcgtagtaattaatgctcttttgtttataattgcaattgagatcgacttaaagcaaaatggtcagcatatcatgctgctttttagcgttcttgccataatttttacgtttattagcttattattagttcttggttttagtaaaaggatgctggcgacttttgcggcaacagttattggaacatttgttgccttgggagtaagtatgcttgtatttatgtggacgcatgaacgggggatttactatgaatcaatggaatatgttacgcaagttcctcgaccgcttttcttagctgaaacattgttggggtctttaggagcggtaatggatgaatcaagcgatattattgccacactttttgagttaaagcagttaaatccagctgttacccgcaaacagttatttatctctggccgcaatgttggtaaatcaattatgggaccgttaataaatgttttgtttttaatttttatggtggatacctttactggtagtcttttgtatatcaaaaacggtaactcgtggggatatacctatgcaatgaatatgagcttagggactattcagagcctgatcagtgggattggaattgtcctttcagttccccttgtcagtctatttggggcattattattaggtaagaaggtgcaaaaatgacgacaattacgggccttggcttagtattgctaattttgatggtccttgtgggagggaaacagggctggacagcttttttaagcttgcttcttaattttggctttttatattttgcaattattttagtcgcgtttcatgttcccccgttatttgtaacggtaactattgggattacaattttggcaataactattttcatgggggaagatgatttgcggacaaccgtgacggcattttatgcttcactcatcgtgctatgcttaattttagtgctgatctttattgtcgagcactgggcaatggtgcagggctttggaacagaagatagtgatgagttagaagggatgtcaattttaattggaattagttatttcaaagtttctgttactactactattttgagttcactcggagcaattgcagaagcggcgatggcgatctcctctggccttaccgaaatccttgagaatcatcctgaaagaactaatcgtcaattaattcatagtgggatggcaattgggcaacagattattggaacaacatttaatacgcttttctttggcttctttggaggattcttagcactatttatttggttcttaggtctccattattcctttggtacaattatgaataacaaaatttttgtggcagaaatgattgaaattctgatctctttcatcggggtgctgatcactgttcctatgaccgcttgggtgatgacaaagcgtcgtaaagttagtgtaagattttcataggttggatgaataattcatctggtcgtggaaatcttttttgtagaccaatttacttatttacaaaaaaagaaaagaccagtagcctttagtgtgtcgaatactaagcaaaggcaggtctttcctcatggatattttaacagaaatcgagcagaatttggtgaaatcaggcagtttatttgaagctgaacagattattttaaaaggggtattggagttaggacaagtaatcatgcaaaactttttggaaagcttagatcgaagcttaaagtcccaagctccagcgaactatcaagtaattaataaacagccacggacgcttaattttatctttggcccggtgacttttcaacgacggtattatcaggctgggacaaagaaacgtgaattttacttagaccaacaattaaaaattaaaccacgtcgtcgtttatcgccacaatacttaatgatgatggctaagattgcccaaacaactacaatgcgcaatactgccgacattttgaaccttgtatttgacagcggaattactgccgattcggtaatgcacgccgtgcatgagttaggaaatcaggtagctaaacaaactcaagcaaaagaacaccaagctactcctcgccatatgcctaaaaatttaactattgagggtgatgcctttatgattaaaggtaaaaaagaagcaggtcagctgactcttgtgcaccattatcgggtttatgagcgagtagctaatcaaatcattaatcggcatgactttctcagtgttgggcaccaaggacggcttgaagcacgactaagtgattatttagaccgccattataagcttgccggtcaaacgatctttttggccagtgacgctggcccaggttacgaaccagctaagctattaagtctagttcctcaaggtgcacatggtgaatactttctcgaccgctatcattgtttacagaaaattgaacatactttaggccggcacaacgagttagccatgcgagcaattaaagccgttcgtcatcatgatcaagcagagctaacaataattttagatacttatgaatcacaaaacctaacggaaaaacaagcagacgacctaatgcgtttaagaaagtatctacagcgaaattggcggtatatcctctcaccacaaatgcgtggatttaaggatattcatttaattggttcagtcgaaagttctcaccgggcttttacttaccggatgaagaaacagggcaagtcatggactaagcagggggctaaagccatgattggtttaattgaagcccgaatgaatggtgaactgcaagctagtttaaatacaatcctagaacaattaacagttcttcctcgagtggctcaaaccagcctattacaggaaatgcatattcgaactggagagtttctaagaaaggcaccgacaaagccgtcaattggagcagtacaaggaataattccgattaacacggccacaagtagaccaatgggacaactttttaaggcactaacccactaaaactgtatatttaaaggctacctatgaaaacttgacagataccgtcgtaaatctgttgttgacaattaccctaaaacaaagtaacatacgaataacttataaatagacctttaatcggagtcctgtgagacttcaaaggtgcggataaattttcaatgctctttccatagatttggattgagtagggaagagacgactttggagcaggaattccaaggccgttttttctttaggaggatttatatggcgcaccgtgataatgttgttttagatgtagatgaacgaccagctccctggcagtggtttggcttatctttgcaacatatgttttctatgtttggctccactgtcttggtcccaattttggtaggattaaatccaggaattgctttatttagttcgggagtaggaaccctgatgtacttactcattactaagcataagattccggcttatatgggatctagtttctcatttgtggtcccgatgatggccttaatgaaaactactggttatccgggtattgcacaggggaccattgcagttgggtgcgtatatttaatcgtatcagtaattgtaacgttggttggctcgcaatggattgaccgcattttgccaccaattgttgtcggtccgattgttgttgtaatcggattatcattagcaggaactgccgctaaagatgctaccatcaattcggctactggccattatgatttgcgcttttttgcggtcgcaatgcttacgatggcaataacagttatcttcaatatgtattttaaaggattcctcggtttaattccgattttgatggggattgtcgctggttatattattgcggtcttatttggcattgtggatttttctccagttgcgcatgcacattggtttagtttgccagactttcagattccatttgttgattatcatccccaattatactggggtgcgattttgagtatggccccaatcgcttttgttaccatgacagaacacttaggtcatattatggttctaaacgagttgactgagcgaaattacttcaaggaaccaggattgaaccatacgcttgcgggagatgggacggcttcgattattgctggtttcgttggcggccctcccgtaactagttatggtgaaaatattggggtaatggcaattacgcgtgtccattcagtttacgttattgctggagcagctgtatttgccatcttctttagctttattggtaaattaagtgccttgattgaatctattccttcaccagttattggtgggatttcattcctactatttggtgtgattgcttctagcggattgcgcgtaatgattgaaaacaaaattgattttaatgaaaaaagaaatttgatgatttcatcggttattttagtaattgggattggaaatgcctatcttcaattaggaaaatatcaattctctggattagctgttgcagctgtcctcgggataataatgaatttaatccttccacaaaaagccaaaagtgaaatgtagtttgaatttttaagcagagtaagaaaaggcatccgacctcttactctgcttttttcgtatgataacaaaacaaaaaaattaagaggtcgtggaaaaaaacagattataagaaaaagtttatcaagtctaagaaaacgctttctttacactcttgtcaattgattagtaggtatatataaacctaatgtttttttgaattttaacgaaattaatgatatattaacattcgtaacttggggtagttcgttttatttgcaacgttcatccaatttacaagccaaattattgttataaggaaagaggtggaatatgaatgggcggtgatgctttaacttttaagcttttcggacttacgttcaatactacgaacattgtttctggactgattatctacgcaatcgtgttcttcactctttacgggatgtcacgaaagatccaaatgaagcctactggtgcacaaaatgtatttgagtggctagttgacttcactaatggaattgtgcgaagccagatgccagcatccgaacaaggtcactatagtttctttgcctttgttttgtttgttttcatcttctttgcaaaccaattcggtttaattttccaattccattggaacggagctgaggtgcttagaagtccaacggcagatccagttgttacgttaacactttctttaatggtaatggtattagcattcgctgctggagtagcacataatggccttggtggatacctgaaagggtacactaaaccatttactttaatgcttcctgttaacattatcgaagactttgctaacttcttaactcttggtctccgtatttttggtaacatttttgccggtgaacttttaatgagtttgattgctaatatggcattctcacatggaatcctaactattattccagggttgttcttggaactagcatggcaaggattctccgtatttatcggttcgattcaggcatatgtctttgtaacattaacgacggtttatatttctcggaagatttccgaataataatccctaaggaggaattttaaaatggcattaggagcaattgctgcaggactcgcggctatgggtgccgctatcggtggtggtatcggtgacggtatcttaatcggacacacagttgacagtatcgcacgtcaaccagaattacaaagtagattacaagcaacgatgtttattggtgttggtttgattgaagccatgcctattattgccatcgttattggcttccttgttatgaacaagtaattattttaagttttttattttaagataaggaggtgtcaatagatgtttgtaaacagtgtgttagctgaatcaaacagtttatacattggtgacttggtattctacatcgttacttttatcatcttaatgctattagttaagcattttgcttggaaaccggtaacagatatgatgaagaaacgtgcagataagattgctaatgacattgataatgctgctcgttcacgtgaaagtgctgaaaagatggctgcaaagcgacaagctgagttacaaagctcacggcaagaagctgctgagattgtaagtaatgctaaaaagtctggggaaactcagcgagcacagattgttgaaacagcgcaaaaagatgcccaagctctcaagcaacaagcacaaaaagatgctgagcaagcacgtcgcgatgcattaaacagtgctaaggatgacgttgcaaacttatctattgagattgcttccaaactcatccaaaaagaattaaaggcagacgatcaaaaagaattgatcgattcctatatcgaagggttggtagaacatgagtcttgataagaagacagttgctgatcgctatgcgaaagcactgtttgaattggtcgatgctgataacgaactcgatcaaacttatcaagaattgattgctttacgccaagtctttgaggacaacgagggattggacgccgcacttgcgggagttcaactgtcacttgatgaaaagaaatcattgattaaagatttacagcaaggtgcttcaaagtacgttgctaacttaattcaaatggttttcgattacggccgtattgactgcatggtcgcaattattgatgagtttgaacggcggtatgaccgtaaaatgaagcggatgcatgctgacgttaccacagcgatccaactcgataaacaacaagaggatcaactaaaggctaatcttgcaaaacgttttggtgctaatgaagttaccttaacagaacatgttgatccagaaattttaggtggggttattgtccatgttgataataagacattagatggtagtctcagctcaaagattaagcaaattcgtcgtttactagttagataaatatatcttttttcaaagaggtgagacctttatgagcattaaaactgaggaaatcagttcactcatcaaaaaacaactcgccaactaccaagacaaagtatctgtcgaagaaaccggtactgttacctatgttggtgatggagttgctcgtgccgatggcttagataatgctatggctggtgagttgctcgaatttagtaacggggtctacggaatggctcaaaacctcgaaagtaatgatgtaggtattgttattttaggggattacacaggcattcgtgaaggagacaccgttaagcggacgggtcgaatcatggaagtacccgttggcgatgcattattaggacgggttgttgactcattaggtcgtccaattgacggtcttggtgagattaagacagataaaactcgtccaattgaacgtaaagctccaggtgttatggagcgtaagagtgttagtgtaccacttcaaactggtattaaggttattgatgccttagttccaattggacgtggtcagcgtgaattgattattggtgatcgtaagacaggtaaaactgccattgcgttagacactattattaaccagaagaaccaagacgtaatttgtatttacgttgctattggtcaaaaggaatcaactgttcgggctagtgttgaaacccttcgtaagtatggagcattagattacacaattgttgtttcagctagtgcttcaaatcctgctccaatgttatatattgcgccatatgcaggggctgcgatgggtgaagaatttatgttcaacggtaaagatgttcttattgtttatgatgatttatcaaaacaagcggatgcataccgtgaactttcattaattcttcgtcgtcctcctggtcgtgaagcttaccctggtgatattttctatactcactcacggttgctagaacgtgctgctcgtttgtctgatgatcttggtggtggttcaatgaccgccttaccaatcattcagacccaagctggtgatgtttctgcatatattcctactaacgttatttctattactgatggtcagatcttcttagattcagatgaattctatgcaggtcaacgtccagctatcgatgctggtacttcagtttctcgtgttggtggtgacgctcagatcaaagcaatgaagaaagttgctggtactttgcgtttggatattgcttcatacaacgaattagcatcctttgctcaattcggttccgaccttgatgcagctacgcaagctaaattggctcgtggtcaacggactatggaagtcttaaagcagggattacatgatccgctaccagtagaagaacaagttgtaacattatttgctctttcacgtggttttatcgataaagtcgaaattgaagatgttcaacgttacgaaagtgaattggctgcttacatgcatgctaaccaccaagacctctacgacaccatcaagaagactggtaagctaccagaaggcgatgacttgcaaaatgctgttgctaagttctctgaaacatttcaaggaactaaaaagcaagccgctgaagaaaaatagttaatgatgattagtcgaaaggacggtgagatttagtgccagcttcactcgctgcagttaaacataagattgattccactaagagtacgcgtcagattacttcggcgatgcaaatggtttcaaccgcaaaactgaatcaaattcaacaccacactcagacctacgaagtatatgctgagaaggttaagcaaatgttgtctgatctggttaaatctcacagcgcaacatctgcagcttcgcaagatgatgtttacgctgcactgtttaaaaagcgcgcagttaaaaagactggggtgcttgtgattacgtctgaccgaggtttggttggtagttacaacagtaacattatcaagcaaacgttagatatgatggctaagcacaatcttgataaagacaacacggtatttctgacggtcggtaaaacagggacagaattctttaagaagaggggaatgaatgtcgtttacgaatattcaggcgttagcgatgttcctacctatcgtgaagttcacagtattgtgaagaccgctgttcaaatgtacagtgatcaagtatttgatgaaatgtatatggtttacagtcattatgttaaccggattacatcaaatgttattgttcacgatgtactcccaattactgaaaagtcattactcaatgacgaaaatgaagcacaagaaaatacagaattaaataattctgatgtaagtactgcgcacgtttctgccgagtatgaatttgaaccgtcagatacagaaatcatttctgcattggttgcccaatatgcagaaagtttgatttatggagcgattcttgatgccaagacatcagaacactcttcaagtgcgaatgcaatgcgttcagctacagataatgctgatgacattatctctactctcgaattgcaatataaccgagcacggcaagcagcaattaccactgaaattacagaaattactggtggtatgactgctcaagaataattttttctaacgtaggaggaaacaacatgagttctggtaaagttttacaagttatcggaccagttgttgatgttgaatttcccttagacgaaaaacttcctgaaattaatgacgctttgaagattaaggaaagcgatggtaagactttaacaactgaagttgccttggaattaggtgatggtgttgttcgaacaattgccatggacggtactgatggtcttcaacgtggtatggaagttgaaaacactggcgcatcaattagtgtaccagttggtgatgatactctgggacgagtatttaacgtcttaggggaacctgttgacaacggaccgaaatttggtcctgatgcaaagcggatgcctattcaccgcgatgcaccaaagtatgatgacttaaacaatgctaccgaaattttggaaactgggatcaaggttattgatttactagctccatatgttcgtggtggtaagattggtctattcggtggtgccggtgttggtaaaaccgttttgattcaggaattgattcataacattgctcaaggtcataatggtatttctgtcttcacaggggttggtgaacgtacccgtgaaggtaatgacatgtactatgaaatgaaggcctctggagttcttgaaaagacggccatggtttatggtcagatgaacgaaccacctggtgcccgtatgcgggttgccttaactggtttaacaattgcggaatacttccgtgatgtaaagggacaagatgttttgctctttatcgataacatcttccggtttacacaagctggttcagaagtttctgccctcttgggtcggattccttctgccgttggttaccagccaacattagctactgaaatgggtcagttacaggaacggattacttcaactaagaagggatctattacgtctattcaagccgtttatgttccagctgatgactataccgaccctgcaccagctacgacatttgcccacttggatgcaactactaacttggaacgtcgattaacccaaatcggtatttatccagccgttgacccattagcttcaacttctactgctcttactccagaaattgttggtaaagaacactatgaagttgctacacaggttcaacacgttcttcaacgataccatgaacttcaagatatcatctctattttaggtatggatgaattatctgacgaagaaaagacaatcgttgctcgtgcacggcggattcaaaacttcctttcccaaagctttagtgttgcttcccaatttacaggtttacctggtaaatatgttccattaaaggaaacaattaaaggctttaaggaaattcttgctggtaagtatgatgatcttccagaagaagctttccggttagttggaccaattgaagacgttgttgaaaaggcaaagaaaatgaaggctgagactgacgaagatagctcagaagactaggagggataattatggctgaaaatacttttaaggtcactattattactccagatggcaccgtctatgataatgataaggttactatactcgttatgaacactgctggtggacaaatgggaatcatggctaaccacgtaccattaattgctgcacttgaaatcagtacagttcgaattaaacattctgaaggcactgatgaagttgcagcggttaacggtgggatcattcaatttgatggtcaaaatgctacaatcgcagctgatagtgctgaaatgcctgaagcaattgacgttgagcgggcacagagagctaaaaagcgttctgagtctgcaatcgaagaagcaaagaagaagcataaccagagcgatttatcacgtgcagaagttcacctcaagcgtgcaattaaccgtttgaatgctgcttctaagcaacgcaatatctaaggtataatatcaaaaagaggttggagaaaataatccaacctctttattattttaaagtgtaaactgctaaaacgcagtagctgcctaactatctttacggggtgggactaaaaactcgcaagcaatttagtctcacttccttttcgtttaaaagatcattaagcttttttacgaattaataatttaatcatgtgatatgatatgattgaatttagtttaaaagagggtgatcgattgcaaattacaggattacgagcgctaatagaaataatagtgcaactggcatttgtctggttagcgttttttgctattcaagggatacattttgagcatttttttaaccgaccaccacgtacattgcctctacttattgttctgatggctactggactaggatatttatgtgcgacatttttcttaaatatcctaagtgcaattggtaatttgacatatttaattcgatagtatttactggaggatcttatggaaaaaattgttgttaagggcggtcagaggttaaccggtcgagttaaagttgaaggagcaaaaaatgcagtcttaccaattcaagcggcatctattttggcttctagtggaaacattaaattatcaaatgttcccattttatcggatgtaacgacaatgaatcagttattacggttcttaaatataaaagtagattttgataaaaataagcatgttttaacaattgatgcagctgaccctgtattatctgaagcaccattagaatatgttagccggatgcgggcatcgatggtagtcttaggccccttgctagctcggacaggtcatgcgcaaattgcgcttcctggtggatgtgcgattggttcgcggccaattgatttacatcttaagggattacgtcaattaggagcggttattgagcaacacgatggatacttagaagcacgggctgaacacttaattggtgatcatatttatctagattttcctagtgtcggtgcaacgcaaaatctgatgatggcagcaacccttgcgcagggaattacaacaattgaaaatgccgccagtgagcctgaaattgttgatttagcaaatatgttgaataaaatgggtgcacgtgttcatggtgctggaacagacattatccggattcaaggggttaatttccttcatggttgtgaacatacagtaatgccagatagaattgaggcaggaacatttatgattgcgacagccattactaatggtgatgtagtggttgaaggagcaatcgctgagcataacacctcactaattgctaaattggaggaaatgggggtgacagtcatcgttcaagaagacgggatccgtgttcttgggacttctgttctaattcccacgaatattaagactcttccatacccaggatttcctactgatcttcaaccacaaatgtccgttctccagcttttggcaaatgggaccagtaccctagatgagacgatttttgagaagcgttttatgcatttagaagaattacgacgaatgaacgccgattttcaaattaatggtccagttgcggttttaaatggtcccacgcgttttagtggcgctgaagtagctgcctctgatttacgagcgggggctgctttagtattggccgggttagttgctgatggaattacccaggttcgtaacctaaaatatattgatcggggatattaccatcttcaccaaaagttacaacaattaggggccaagattgatcgaattgatgtcgaggataaaattaaattggcggtaaagccttctaagaataaaacaaatcaagattaaagattcgtaagcgacgtctatctatatccctattttgtggtataattacgaacggtattaacgagtttagtgttaaaacttaactagctaaaaggagaagaaattaatggcaaaggatattggaattgatttgggaactgccaatgttttgatttatgttcaaggcaagggtattgttctaaatgaaccgtcagttgtggcggttgatacaaaaaccaataaagtattggctgttggttcagaagcataccgaatggttggacgtactcctagtaacattcgggctattcgtccattaaaggatggagttatttctgattttgatgttactcaagaaatgctttcctactttattggtaaactaagcgttaaagggtttatgtcaaagccaaacatcatgatctgcgcaccaacgaatattactgagattgaacgaaaggcaattattcaagccgctgaacaatctggtggtggtaaagtttaccttgaatacgagcctaaagtagcagcaattggtgctggattagacatttttaaacctcgtggaaacatggtcattgatatgggtggtggtaccagtgatatcgccattctttcattaggcgatattgtctcaagccagtcaattcggatggccggtgataagatgaatagtgatattgcttcttatattaagaataagcacggcctagtaattggtgaacatactgctgaaaagatcaaaatggaactcgggactgcattacgggttgatgatcctaaaacaatggatgttcgtggtcgtgatgtagctactggaatgccaaagcaaatcacggttaatgaaaatgaaattgaagaagcattgcacgatacgcttgaacaaattgtttcagccgctgtaaatgtattagaaacaattccaccagagttagctagtgatattattgaccggggaataatgttaaccggtggtacttctttgttaaagggtgtcgatcaattattcagtgctcgtctaaaggtaccggttgttgtttcacaagacccattagacaatgttgctaagggtgctggtgaaatgttagaacggatgcaaaagactgaacgaaagaagtaagttgaaatggtaaggattttatgtgaccttatacgctggtatcaacaaggcatttccgcccaacgaccatttcgcgtatgtcgctttaccccctcatgttcacagtacatgttagaagctttacaacgctttggtttaaaggggatgttgctcggaagttggcggctccttcgttgtcagccgttttctcgtggtggctatgatccggtacctaatcattttacttttcgtcgtcaggggtaataatagttattaagggtgaaaaagtgtcaaagaaagataaaaaagtagaagtcagcgttaaagatattgaacgtcgtaatcaaccggttcaacaaatttttattggagaccgattgattggtgaagttgtaaccgataatgaacgtttcaaagcaatgctgataagtgaccagagcgaattttatgttcgttctcaagaagagggattagaaatagtccttcaacaatatcatcttcaccagcattagtttggtgaaccatcctctttgattaatattttgtaaaggagtttggtaatgcaacgttcgcaaaatgatgtagaaagtcggattgactggggaattatattttgtgttcttttgttagccttgattggtcttgcttcaatctatgtagcggcagttcatgatcggcagcaaactagtgtagcacgacaggttattacccagttggtttggtatgcggttggaacaatccttattattgtcattatgcaatttgatgctgaacaattatggaaattagcaccaattgtatactggctaagtgtatttttaatgttcgcaatcctagtattttatagtcgagcctattatgctagtaccggggctaagagttggtttgcaattggaccatttacgtttcagccttcggaaataatgaagcctgcctatattttaatgatggggcgtgttattacgactcataataaccgatatagtgtgcatactgttgattcagattggcgattaattgggacgatgttcttatggctattaccaattttaatttcgctgaagtttcaaaatgactttgggactgggttagtattcttcgctattttctgtggaatggtcttagtttctggagttacttggcgaattttggcgccagcagctacgatattagttgttgttgggggctcagccttagcgatggtaactagttcggttgggcgacaaatacttgaacatgttgggtttcaagcataccagtttgatcgggttgatacctggcttcatccagaacaggatacaactaaccaagggtatcagttatggcagagtattaaagcggttggttcgggtggtattactggaactggttttaataactcaaaggtttatgttccggttcgtgaatcagatatgattttttccgttatcggtgagaattttgggttcattggtggggttttattaatccttatctacttgttactgatctacttaatgattcgagtaacattcgataccaagaacgaattctatgcttatatctcaactggagttatcatgatgattttattccacgtttttgaaaatattggaatgaacatcggtctattaccattaacaggtattccgcttccatttattagtgctgggggatcctcattaattggtaacttgattgggattggaatggtaatgtcgatgcgttaccatcatcattcttatatgtttagcagtaatcgtgaatttagatagtgaggttataaaatggcaaaagattatttttgggtaaaagagcaagcagatggtactaagcgtgtcggcttaaacgatgaaggccgtgatgagttaggagaagtaagtttcatcgatgtaccagcagtagggacaactttgaaacaagctgacaaatttattgcagttgaagcagaaaaagcagttaccgatgtggatagtcctattgatggtaagattaccaaaataaatgaagctattattgatgatccggctggattaaattcaagcgatatggaaaaaaactggattgttgaagttaaataaaaaataggagactaggattaggggaaccttgattttagtctcctatttagtattggcggatctttccagttcatgttatacttaaggttctaggaaaacggctaagataaaaatatttaaggtggtatttattatgaccaaaaaattacacatcgctttattatttggtggtaactcctctgaacatgatgtgtcaaagcgatcagcacataatatctatgatgctcttgataaggaaaaatatgatgtaagtctttttatgtttacaaaggatggaattctattaggcaatgaggattctcaaaagatctttgatggtgaacctgaagaccaagtggtagcagaagcatatcaaaagatggatatgagtagtccattagcaccaattatggccttaaacgaacaaaaggaaattgatttcttcttccctgttatccatggtaatttaggtgaagatggtacaattcaaggcctctttaagctccttaataagccatacgttggttcaaatattgcagctagtgcgatgtcttttgacaaggatcttactaagaagattattagtcaagctggtattcgcaacaccccttatgtagtagttacgccagaaaaccgggctgattattcatggagccggattgaagaaaaattaggtaatctcacttttgtaaagccagctaagcaaggttcctccgttggaattcatcgagttactaacgctgaagaatatgaaaaagcgttagatgatgcttttaagtatgattacaagatcttagtagaacaggggatcgctaatcctcaagaaattgagatttcaatcttaggaaatgaacatccaattgcctctaagttaggagctgttcgtgtacctaaggacgatccattctatgattacgaaaacaagtttgtggatgccagcggggttgtttttgaacttcctgttaaattaccacaatacttagttgatgaaattacagatatggctttgaaagcatacaaggcattaggaatgaagggaatggctcggattgactttttagttgacagcaataatgtcccttatcttggtgaaccaaatacattaccaggatttactaacattagtctgtaccctcaaatgtgggaagtttctggtatttcatattctgacttgattgatcggttaattcaattaggattacaagaatttgaacgaaacagcaagattaaatacgacttccgtaagcttggtactgaacgtgttggtcaaaagaaatataacgaagactaaagaataattatttaatggttaggatgttgtgaagacaatgtgctaactatttttattattaaaattatagcaggaagtaaatattatcgtaatggtatgaaatccgtggtttagtattgcagtaagcaaaatttataatataatgaagatacgtagtttttgtaagcgttagagtagcttacagtcacactacttatagtactttataaccatcgcagggggtgactttgaaggtggttataagcatttattttttataaaatttattgtattttaagcataaaaatagtattgatttatttttggtctataataaaagacctaggtaaagccaaagtaatttttgttgctgatggtggtataataccattggcaatggtacagttcatagagtacatattttatattcaacaattatgattaaggaaggtaaacaatgagactccgaggagacgtattaaaacaaattcgtcgcaagcgtggattgtcccaaacggctttagctgaagggatttgtactcaagcgacaatcagcctaatggaaaaacaaaatcgcttacccaaaatggatattttaacggcaatatgtgaacgcttaaatatttcttctgatcgaattgtcgaaaatgaagttagtggaattaatgaaacattcaaccaaatcgttgataatttgatttcacgcaattttgaagatgcttcagcgcttttgaagaaggttcatgtaaaaaatctagaaagtgattttgataaacaacgttactactatctagtaggaatggttcaagttgaaagtaatcaaattgatgaagccatttttaattttgaacttgttttaactcaatttgctactactagtgctaatatttatttagctatgacaactgcaggaatggcgcttgcttacttaaaacgtggtgataaagaacgggcagcacggttaactaaccggtctgtaaaactgattgataataaaaaattgattgggagcctttatcaatgggcatcaattgattgtcaaattgcagaattatatctgcaacttgaagaccctgataacgctattgaagttgctaataagggaattgaactttgtcgggaacatgattcattattcttattagatgaactatatctttgtataggtcgtagctacatcctaaagaacgacaaggaagaagctaaaaaggctttaaagattgctgaaagtcttagcattgctcgtaatggatcagtagcagaagatacaattctattagagttaaagaatttagaaatttaattaatatacgtaactgaaaaacgaagctgagagatggttaagatgtctcagcttcgttttttagtataaatttaaatatttatccgtacaaataattaataaaaacttaattgattattaaagactaatttcagtttatgtgcattaaacgagaattagtcttttttagtagtaaaaaaataaaaatatttttcacatgcataactgcttttaaatacaagatagacatgaaattgttaaatgtataaaatgctttttcacaattggttatgattaattttaaataattcacttgatttatacgtacaaatattttatagtaataattgttcaatgaaagcgcgttcatgttcatgaaaaactattactttttaatttttaaggaggatgaatgtaatggctaaagccgagaagaaaatatcaagtgcatttatctacttcttcggatcatttgggggcatcctatttggttacgatatcggtgttatgactggtgccttacctttcttacaagctgattggcaccttgaaaatgcagcttctctagttggttggattacttcagcagttatgtttggggctatcttcgggggcgcattagccggacaactttctgataagtttggtcggcggaaaatgattttaatgtctgcgattgtattcatggtattctccgttttatctggtgtttcaccagacatgggcgaagcaagtgcctattatctaattattgttcggatgcttttaggtttagcggtaggggctgcctcagccttagtaccagcttatatgtctgaaatggcaccagctaaagcacggggacgtttatctggacttaaccaaacgatgattgtttccggaatgttattatcatatgttgttgacttcctattgaaagaccttcctggtgaatgggcatggcgtcttatgttaggattggcagctgttcctgctttaatcttattccttggtgttcttcgtttaccagaatctccacggttcttattacgtaaaggtgatgaagcgcaagccaggaaagttctttcttacattcgtaaaaatccagctgagattgaccaagaattagcaagtattaaagaaaccgctaaagaagagcgacaagcaaatcaaaagacaagttggtcaaccttattcagtggcaagtatcgttacctagttattgctggggttggggttgcagccttccaacaattccaaggtgcaaacgcgatcttctactacattccattaattgttcaaaaagcaactggccaagctgcatcttcaaacttaatgtggccaattgttcaaggggttatcttagttgttggttccctggtttacatgtggattgctgataaatttaaccggcggacattgttgatggttggtggtgccgtcatgggactttccttcattcttccagccgttattaattggatgataccaaatatgaatccgatgacgattgttgtgttcttatgtatctatgttgctttctactccttcacatgggctccgttaacatgggtgcttgttggtgaaatcttcccactagctatccggggtcgtgcctctggtttagcttcatcatttaactggattggatcatggttagttggtcttatcttcccaattatgacggcaagtatgccacaagaagctgttttcgcgatcttcggaattatctgtatcttaggagttatctttgttaagacttgtgttccagaaactcgtgggcacactcttgaagaaattgaagagcaaggaacaaaccatggtcgagtaaaggccagcaatcctgaaaactaggaggaatactctatgaatttacgtgaaacagcgacacaagtaaaaaatggtcaggcttcactaggaattgagttaggctctacccgaattaaagcagtcttgattaatccagattttgaaacaatctcttctgggagctatacctgggaaaaccaattgaaagacgggatctggacatacccgctggatcaggtttgggaagggattcaagctgcttatgccaagattaaggcagatgtccaaagcaagtaccatgtgagcttggatgaaattagttcaattggtgtcagtgccatgatgcatgggtacctaccatttgataaaaataaccaattacttgttccatttagaacctggcggaataacatcactgaggaatccgcagataagttaactgatttatttgattttaatattccacaacgatggagtattgctcacctctaccaagcaattttgaacaaggaaccgcatgttaaagacattgatttcattacaactttagctggttatgttcactggaaactttcgggtgaaaaagttttaggaattggggatgcctcaggagtatttccaatcgatgatcaaacattaacttatcatcaagactttattgacaagttcaattcattaccagaagttgaacaatacccatggcaacttaagaatattttgcctgccgtccttgtagctggctgtgatgctgggcacttaactgctgatggagcaaaattacttgatccaagtggaactttacaagctggtagtttgatggcccctccagaaggggatgcaggaactggaatggttggaactaacagtgttcgaaaacggacaggaaatatttcggttggaacttcagccttctcaatgaatgtgttagatgctccattaaagaagcttcaccgtgatattgatattgttactacgccaaccggtgatccagtagccatggttcatatcaataattgttcttctgatattaacgcctgggttggattatttagagattttgctaatacaattggagccaagatcgataccaatacgctttacgagaccctatttgattcaacggttcactccgacccagatgctggtggattaattaattatagttatctttctggtgaaaatattaccaagattcaggaaggacgtcccctatttgtccgtactccaaatagtaagatgaacctcgctaacttcttccttactcaactctatgcagcatttgcgccattgaagattgggatggatatcttactaaatgaagaacacgttcaaaccgatgtcatggttgcgcaaggaggactctttgggacaccagttattgggcaacaagttttggcgaatgccttaaatatcccaattacaatcatgaatactgccagtgaaggtggaccatggggaatggcggttcttgctaagtatgctgagacgtacggaaaagaatccctagcagattaccttgacgaaaaagtctttaagaatccagaaagtatgacccttacaccagaacctgctggcgtaaaaggatatgaaagctttattactcgttaccaagcaggcttacctgttgaagcattagctggtgatgacattaaagaacgtgaagagaaagggagtaaatagtacatgttagaagatttaaagaaagaagtttataaagcaaatatgcggcttcctaaactaggccttgtttcctttacatggggcaatgtttcagggattgaccgtgaaaaaggattgtttgttattaaaccttctggagttccatatgaagagatgaagccggaagacatggttgttgtcaacttggatggtgaggtagtcgagggtgacttgaatccatccagtgatactcctactcacacttacctttataatcacttcccaaagattggtggagtcgttcatactcattcaccatgggcagtagcgtttgcagctgcacggatggatgttccagcaatgaataccactcacgctgatactttctatactgatgtcccagctgctgatgctttgacgaaggaagaaattgaagaagactatgaaggtaatacaggaaaggtaatcgttcgttcattcaaggaacggggtttggactatgaagcaacccagcggcattagtaatgcaacatggtccatttacctgggggccaacacctgacaaagcagtttataatgctaaggtgttagaagttgtggcagaagaagattatcatgcaatgcaattaacgcaccaagaccttcacttacctcaatacttgttggacaaacactattaccgcaagcatggtgcgaatgcatattacggacaaaataatgcgcattcaaaagatcatgcagctcacgcttaattaatttggtagctacatttaaaaacttttttaggataaaaggagtgtaatctcatggatattaagaattacgaattttggtttgttactggtagtcaattcctttacggtgaagaacaattaaagtcagttgctgctgatgctgaagatattgttaataagttaaacgaaagtggtaagttgccttacaaggttgtcttcaagggtgttatgacaactgctgaaggaatcactaagtttatgaaggaagctaactacaatgacaacgttgccggtgttatgacatggatgcataccttctcaccagcaaagaactggattcggggaactaagcttttacaaaagccactgcttcacttagcaactcaatacttgaacaagattccatatgacaccattgactttgattacatgaacttaaaccaatcagctcatggtgaccgtgaatatgcttacattaacgctcgtttacaaaagcataacaagattgtttacggcttctggggagatgaagaagttcaagaagaaatcgctgactggcaaaatgttgcggttgcttacaacgaaagctttaacattaagattgttcgttttggtgatacaatgcggaacgttgccgttactgaaggtgacaaagttgaagcccaaatgttccttggctggactgttgactactggccagtaagtgacttagtagaatatgtaaatggtatcagtaaagaagaaattgatgctgcttacaaggacttagcaagtcgttatgaaatggtccaaggtgataatactaaggaacactatgaacactcagttcgttaccaacttcgtgaatatcttggtttgaagaagtttatggatgaaaaaggatacactggctttaccaccaactttgaagacttgcatggccttgaagaattacctgggttagctgctcaattattgatgcgtgatggctacggctttggtgctgaaggtgattggaagtctgccggaatggatcgcttattgaagattgctgctgataatgttgctactgcctttatggaagactacacattagaccttcgtccaggtcaccaagcaattcttggttcacacatgcttgaagttgacccaacaattgcttcagataagccacgagttgaagttcacccattagacattggtggtaaagatgacccagcacggttagtatttactggtcgtgaaggtaaggctgtcgatgttaccctttcatacttcaacgatggttacagggttattggttactcagttgattgtcataagccagaagctgaaacgcctcatcttccagttgctaagcagttatggacaccaactgttggcttaaaggaaggtgctgaacgctggatgcatgctggtggtggtcaccacacaatcttgagtttcagtttgaaaccacaacaaattaaagatcttttcggaatgttagatgttaaagttgattttattgaatagttaattcaaattaaaaatcctcaaaatggttctactcggcaaacctcgagacgagtagaaccattttttatcaggagatggaaaaataaaaactgaaaaagagaaaatgctagcagaggaagcttttaacgtttacgatcccgaattagttaaagagcgtcaatatgcccgtcaattagttgagcgatttaatgctcttggcgagatgaacccgactgcaagcaatactgtgattcgtcaattgtttggacacgttggcgaaaaatgtgaagttcatccgcaattcaaatgtgattatggttataacatttatgtagatgatgattttttcgctaattatgattgtgtcatgcttgatgctagtccaattcggattgggaagcattgtttattgggaccgtgagtgcagatttatactgttaatcatctcttgaacccacgattacggcgcaatggagcttacggccaaagtaaggatgtcactattggggataatgcgtggattggtggcggggcaattatttgtccaggtgtaactttgggtaataatgtaattgttggtgctggaagtgtagtgacaaagtcgtttggtgataatgttgttattgcgggtaatccagcacggatcattaaagagaatccatatgtagaataattgattatttcccaggttatttttaatgcaaaaagggaactaagatatggtcatgtgacggccgttatcttggttccctttatcattcttaatatttaaggttatattcgtaaactagtgctggttctttacctacgcgtgtaaagttatttaagttattaatagcagtcatttcctcgtcgcttaatgtgaagtcatagatgttaatattttgcttgattcgcgcttcatgaactgacttcggaatgaaggcgaccccgctttgcaaatgccagcggaggacaacttgagcagcagacttatgatggttagcagcgatcttattgagggttagattgtcgaggatggttccacgcccaagcggactccacgcctgggtaacaatatcatgttccttatcgtattggagcaatggttgttggtttaggcgaggatgacgttcgatttgattaataacgggcatctcatgcgcttgagtagcaagatactgaaggtgaatcatttgatagttactaacaccgattgaatgggtcagaccttccttttttaattcttcaagggctgcccaagtatcaaagaaagctcgctcaattggccaatgaataagtaaaaggttaacataatcaagcctcaacttttgaagggagtctttaacagaggcaattgtttgcttaaacccttgattaggttcagatacttttgtggtaataaaaaggtcctcacgaggtaaaccaagctcttgtaaggcgtttccaacctctgcttcgtttttatataattgcgcggtatcaaaaagacgatagccagcatcataggcatactttatcgcggaggtaatcgtactttgatcagtaattttatataagccaaatccttcttgaggcattgattgaccatcagcaagtaataattgttttatcttattattcattgatattctcctttgtaataagcgaagtggtcgattgtcccttaattattgttggggtataaacttttgaagtgacttcttcgcctgcaatcatttttaagatcattttcccagcatcttcacctagttgacgtttggggtgattagctgtagtgaggctgggggagataatttgcgccatttcatagttatcaaaacctattactgaaatatcagttggcacttgttttccatgtttttgaagatgactaataactcttgtggcaaggcggtcattatagcaggcaatcgccgtaatatcattattactattaagcatcatgtcgacttttttgataatatcttcatagtcttcgcttgattggtacataataacatttgatttagtagtggggatattgttatcttgataggctttgatcattccagtcatgcggtcaacgccttgctgatcatctatttggaatactcctaaaatattagtatgtccgaggctaaagaggtattttaccaaattctcctctgcttcccggtcttttgtcagtaaagaaggaaaatcaaagccaggataagtagagtgaaataggattgttggaattttatatttctggacttgccgataaaggtctaagttaggattaggcatggcgctttcagtcggctcaataattaatccagcaatttgaagatccaacatatttaagattgtttggcgttcacgtttatggtcattaagcgtatttccaacaatcattgagtaaccttgttctgttaccacactatcaattccggaaatgattggagggaagatatagtcagccatatgagtgctgattacccaatgattttatttttttcgctttttgtccaatcgcgttgccagtcttgaacaaacatcccaccaccttgaatacggtaaatatagtgctcgttttcaaggtccccaacagcgcgacgaattgtataacgggacacattaaaacgtttcattaaggcactttcagttggcagtttttcattgattttatattttccatcaataatttcgtttcgtaaagtttgctttactgtttcatatttcacttccaatgctttgcgctcctatcttaataaaagtagttttgaatatataaaaaatgctccatataattagcaacctgctaacgcctatgaagcatttgattgattttatcttgatatttagaaccgacgcttctttggattttcgattggcttgttatccaaatcggtccgtactactagaacatcgcaaatggctgttctagtaacaaattcggtaacagaaccgatcaaaattcgttcaacagcgtttagcccagtagcaccaatcatgatgaggtcagcacccatttcctttggcatatcccgagcaataattgtctttggagcaccatattcaatggagtaactagcgttttcaacaccgtgctctttagcatagtcgatgtacttgtctaaagtcttctttgcagtttctgtaacttgttcaaccattgaagtatcgaaactagaaatattttggaatgcacgtgtgtcaacaacgtgaagtaaacgtaattcagtgtctgcaccattacgttttgctacagcaacagctttcttaaaagccaattcagcttctttagaaccgtcaacaggaactaaaatgtgtttgtattcttgtgccataattgtagtgccctcctgaaatctttatattatatacttattatacactttttcactattgagcgtaaagcgcctacgaaacattacttgcgatgatttatgcgaaaatcagcagtaattgcgaaagacattaacgtttcgctgacacagccaatgattaccataataactagaaatccagtattgtttgtccatccagaaatgatacttagaataccgacgacggtcatcacaatcccccaattttttaattgtggagctaaatatttgcttttagtaggatcgaaaataagaaatggcttatggatgtgggttaagagaaagactccttcaaaaagagcaattaaaccaaatagagtcattagaagtggtaacaacataaaaatctatcctatctataatgaaattaaaatgagggtgagaaaaagcaaaaatctttctcaccctcactaaatatgtacgaaaactccgttggtgccgttaattgtcattcagtgttgacctgtgtttaagacaggtgggacacggctgcctaatattcaactaccaagtgtaaaggcatgttgtccaaaaggcaatgcactagtcccaaagtaataagactgtaaggcaaacctgcgtttagacaacgcgtacactacagaattttcacttttataatagcatttttaagtggttgatgcaattatttgctcgggtgatatttacctcgtaaagtatgttgctgggccttccgtaattgccaatattgccggcctaaactggcttcaaaacgaccattattttttggctggtaatattgagcatctttgattcggtcaggtaagtattgttgagctacccaatcttggggatagtcatgagggtaatcataatctagtccatggcctaacttagcagctcctttatagtgggcatctttaaggtgagctggaacgtcaccaaagccaccttgccgaacctgagcaagagcttcgtcaattgcattaattcccgaattggattttggtgacaggcataattcgatgacagcatctgctaagggaattcgtgcctccggaaagccaactcgttctgccgtttgaactgccgtaacagctcgttgtacagcaggcatattggcgagcccgatatcttcgtaggctgtgatcattaaacgtcgtgcaataataggcaggtcaccggcttcaattaaacgtgcaagatagtggagggctgcatcagtatctgacccgcgaatagacttttgaaaggctgagatgacatcataatgagcatcgccatctttgtcagcggataacgcctttttctggacgctttcctcaataatcggtagcgtaagatgtattttcccatcttcacttggatcagttgatttggccgcaagttctaacccatttaatgcacttcgaagatcaccattggtcgctgctactagttggtcctcggcgttttcttcaaggactaatggtagattacccagaccgcgttctttatcaactaatgcacgctggatagcggtcttcatttcatcagttgaaagtgagtaaactgggaaaatttgcgtccgactgcgaatggcgggattaatactaatatatggattttctgttgtcgccccgatgaggataattcgtccgttttcgaggtgcggaagaagaaaatcttgttttactttatctaatcgatggatttcgtcgagtagtaagattacagttccgctcatcttagcttcttctgcgacgatttgtaaatccttttttgtatcagttgccgcatttagttttcgaaaagcatatttagttgaaccagcaatcgcactggcaatgctggtcttaccagttccgggagggccgtatagaatcattgaagaaagcatttttgctttaaccatgcgtgagatgattttacctggtccgacaaggtgttgttgaccgaccacttcatctaacgttcgcggccgcattcgataagcaagtggttgttgcatatattagccacgatcctttctatggaagagatggtggaaaaaactttgatgttgatcattgtttttttcagtcatactactatttgaatttaccagattaggatatcgttttttgacgtcgactggtgattggtaaacagctgtttttgccgccacgacaactgctaatgagcctgggtcagttttatattctggatcagttttcaatgtaaattgagcattatctttagcagcagtttgaatgtatggatgaatttcgtcgtgagggagattaccgttgataaaaacaaggttgccaattccacgatctaactcggcagttaatgcctttgtccaatcttgttcctgtagttcttgaacactaattgttagacagacgcgttcacggaatgttccgagatattttcgctgttcatcgggcttgatttttggtgtaccgtaaacagcattgtcaattcgctgttgagcagcacttttttcttgttcagacatattgaacgcctccttatcatgcaattgtaacacgaaatgcagaaaactatatttcttgataatgttataatttttgttatatcatgactatgaagaaacaaaagtaggctaacatataagggaagtgattattatgtttagtgcagtattttgggttttagcattttggtttattgtcaatctagtctggacaattgcgcgccttaataatcggatgatgtcaagaacgtttgcctggataaatgtagtggcagtagtaattggtttttggacgttttacgctgccagcaatggcgggggcggaattgctccttggtttcggttgatgaattggactaacattgtccttgcgatttttcaattttataatggataccgcccacatcaatatagtaaaaaatcaggtggattatagaatgaagttagccacccagttggtggtaaataaaaaacgccattcggcgtgacatcaggtatcatattaagtgaaccaaacctatatgaaaggatgtccgtcaaatgacgcacttaaatgataccatgtctactagtttattaactactcataaaaagaatgctcatcttactaaagaagaacgtgtgatgattgcgactttaaagtcgcaaggactttccaatcgcgcaattggtcgccaattaggagttaatcatcaaacaattaataacgagctcaaccgtggtacggtccgccaacttcgtcgtcaaaaatctaatggtaagatttacgaatattcttactacatctatagttatgaagctggtcaggccacatatcttgaacatcaccgccattctggtcgtcgtcgcttatattattcttcaaagcaatttttacgattagctgatcagctaatgcttggtgagtttgacgaccaccattactccccacaagcggttatttataaggctcgagatttaatgaatgatggcaccctgatcccaaagtcggttgtaactttatatcaatggattaatgagggtgtgcttcgtacgtccaatttagacctctttgaaaaacctaaacgtaagcatcatcgaactcatccgcaagctaaaaggtgcttagggcctaatattgctcaacgacctcaaactgcggaccaacggtccgaaattggccattgggaactagatacagttcagggacagaaaaatgacagtgttgtactagtaatgactgatcgcctttcacgagttaatatcacgagtaaaattgctggtaaaactgcgcatgcagtaaatcagttctttataaatttacgccagaaaatgggcacagatgcttactatcgcatctttaagacaataacctctgacaacggttcagaatttagtgagttaacacaagttcacgatcatgttttctatgctgatccgtattccccttgggaacgtggatccatgagatcaataaccggtttctccgcaaggagattaccaaaggtgaagctataaataactatagtagtgctcagatcatagcgactaatgattggatgaatcactatccacgagctatgtttaatggacattcgtcaatggatatctatcgtaaggccttctaccaagagatatcacagctccatcaaccaataatcaattggtcagtattatttatttgagtccagtggctaacttattcttgaaatttagaatagtaaaaaatcatagctctaattaaaaagcttataaaaaggcgaggctgagagaaaacttttgttttctctcagcctcaactgcttttatgaacaatagtaagataacgtggaaaataaccacaaggctcgagtctaagtacgaacgataatcagcctgtgccgtgctaatcatcgtcctagcttagccaaccgccttgtcgaggaggttattttccactcgcctttggtgttttattttacaatttcacaaaattcgattgtttcactgttaggaccttcaatgttgaagaacttaattcccttatcccagaagtcaaggtgttgaacttcatcgtcctttaggttgaaaccttcagccttagcagccttgaaagccgcgtcagcatcactagtattaagggaaatgtggttaatagcacccgtttcgtgaacggcaccgtcgccagtccagatttctaaagtgaggtgaccatattgcatgaaaacaacttcatttccttggtcatcagtatcaaattcgccaagtttcttgaaaccaagcttttcccaaaaagcaattgtttttgccatatcatcggttggaatcccaatgtgttgtacatcgtcaaagtaacctgctaaactcttgttaaatgccataataaatcactcctgtataaattttaattaccaatatcaagtgcctggtgctttaatttagggaagatatgacggtctgaccaaccagtaattgcaccttggaaggcaagggcaaataaagttcctaatccaaagttgtaaatactgccttgcatgaatgcagcgataattgccataattgttggtggaatgtatgataaccacatcgcaatcgttgcgttaccatggcaataacggaaacgaataatttggaaaaggtcatcagcggggtgtaacacgaggttgacacgctgataaattgaaatggcggttccgatgaaagcaacccctaagaagttaatgaaaacatataggataatcatcggtaaggtagtggcgtccggcataattcggttaaagatgtcagagaaccactggataaaaatagaaaatggcaacatgaaaataaaattaccaccaattcgtcgccagtcccacttatgcatcaaaattgcgttgaggatagaagttaacatccctaagaccatgaaagcccagaaaagggtcattgaattgttccctaaaacggcaatccctaggttgttttctgcggctgtccaataagcggagccaagaaattgtgggtggacgtgtgaacttgtaacaagtgttaggacgttccccattgagttaataacaattgacagtgcaaagtatgcccaactagcagttaatgaaattgttcgctcggcaacttgaccttgtactggaactttttcttgttccatttatattctcccttccaacttgaccaatcatttggtgaagttattcactttctctctacgatgaattaatttacaaccatcaaaaaatcttgtcaagcgcttcacaagttgaaatgacgggatttatcctataccaaaattattgaaacgatttactgaaagcgcaatcatcaagtgggtgtaggaaacataaatctaattagaccaattagctgaaaaagcttacaaaaaaattttgaaaggatgagatatgtgaaaataatcatttctccagcacgaacaatgcaagttgataccgactccttactttacaaagatttgccggaatttcttcagcagacaaaagacattttagggtggatgaggagcttatcttatgatgagttacacaaagtatggggaaattgcagctcgcgtttagcgatgaaaaattatcaatggctccaacaaatggatcttcaacgaaagctgacgccagcaattattgcttttactggtctgcaatatcaatatatggcgccaagtgttttctcagatgatgggttgaaatacgttcaagacaatttacggatattatcaggattttatggtattttacggccgtttgatggaataataccttaccgcttagggatgggtgacatggcgccagtgaatggatataataatctttatgacttttggggagaacaactttatcatgaactctataagaataatgatttagtaattagcttagcttcggtcgaatacgaaaaggcaattactccttatctacaaactcaagatcgatttatcaaatgtatttttggcgaagaaatagatggaaagataaaacaaaaagcaacattagctaaaatggctcgtgggaatatggtgcgatatttagcagaaaaccaaattcaaacaattgaaggcgtcaagcagttttatatcggcggttaccattttcgggaagatctgtctactgatgaaaaattagttttcgaactggtaaagtaaaagtaatcatattatttgccaatctttttgaattgtcttataaaagaattgtatacaaaactattaacagtgcactgattctattaaatttttaatgatagaagggagtcaaattatggtaggcgattctttaaataagacaggtgccaatttattaatcaaggccttgcaagagaataatattaaccggatgtatggaatagttggaatcccggtaaccgatttagcgcggctcgctgaattacgcggaatgaaatattatggttttcgccgtgaagattcagcagttaatgtcgccgcggcaactggttacttaacgtaaaaaactggcgttgcattaactgtttcagcacccggttttttgaatggattaacagctttagctcaagctactaagaattgttttccgttgattatgatttcaggttcgtctgaacgccatattattgacttatcacagggcgattatgaaggtcttgaccaatataatgcggcaaaacccttctgcaaaaaagcttatcgggttgatcgagcagaagatatgggattagctgttgcaagagcaattcggacagcagtttcaggccgccccggtggtgtttatcttgatattccagctgacacaattgttcaagaagatactgctgatcaatctaattttggggtttataagttagttgatcctgcccctaaacaggtacctaatgatgaagcaatatcacgagcggttgatttaatcaagaatgccaaaaagccctttattattttaggaaaaggagctgcctatgatcagaccgaaaaacaagtgcaacaattagtagctgaaacgaatattccatttttgccaatgtcgatggcaaaaaggttaattccagatgatagtcctcattctgctgcagcggctcgttctctttcactacgaaatgccgatgtagtaattgtaattggtgcccgtttaaactggatgctttcatatggggatgccccacaatttaacccgcatgcaaaatttgttcagctagacatcgatgccacgcagtttgatttctcacagccaattagcgtcccgctccaaggagatcttaagtcgattttaggtaaattggttccggcgctattggcaactggatatcaagcgcccgcagcatggttagagcaaattgcgcaagatactgagaaaaatgacaaaaagtttgcgcaacgaattgctaatggtaaagtagcacaaaaatttggctattatggagcgattgcgcctattgctgaatacttccaacaacacccagacacctatctagtcagtgagggggctaatacgcttgacattggacgcgatatgattggaatgcagctcccccgtcatcggctcgatacgggaacttggggcgtcatgggtgttggccttggttatgcaattgctgcggtggttgaaacaggaaaacatgttgttgcgcttgatggcgatagtgcatttggttttgatgggatggagattgaaacgatttgttgatataagttgccgattacggtcgttattatcaataatggctgaatttataacgggatcggccaagttgttcccaatcaacttgggccaactactcttgatccaactgcaaggtatgatttaatggctaaggcctttggtggcgataattattttgtaagtaattacgatgagatgaaaaatgtctttgcaagagctgttgactcggaacgcccaaatattattaatgttcaaattgcaccatcgatgggaaaagaatctggccttattgggaatctaaatccaaagcttaatttacaaccacttgaagaaaatgagaggagccatcataatgactgaacaaagtgaaaatgcaccattaaaaggaattaaaattgtggactggacacgggttcaatcggggccttcctgtacttagcttttagcatggctaggagcggaagtgattaaaattgaacggactaataccggagacccaactcgtaatgagctgcttgatattaaagattcatggagcctttattatttacaacgccgtttgtaaaattaagttagaaaaatagaaaagccatttgtggtagacttttgaatacccctaaacaaaagaaaggaaaccacaaatgacttacacccatcttaccacaaacgagctgacaatcatcgcccattctttcgtgcaaaagcttaaagcgtaccgagtggcccaaatgatcaaccgttgtgccgaaaccgtttatcgcgtttatcgttacctggaaaccggtgcctcaattgctgattatcaagatcactatatgcgcaataagcaacgttgtggccgaaaacgtactcagttgtcactggctgaactcacttatatcaacgacaaaattacccaggggtggacgcctgataccattattgggcgcgctgagcgcccaattagttgtaaccagcgaactctttaccggatgtttgaacgtggccagttcggcttcgatgtccgttccttgccgatgcgaggtaagcggcacccgaatggctatgtcgagcgccgcgggaaggctggccaattggggagaagtattcacgagcgtgccaaggactttccgcactatgccacttaatttgggcaccttgaagctgataccgtccaaggcaaaaagcagcaaggggcggtaatgaccctgaccgaacgccaatcgaaggtcgaaattgtactcaatgtgcacgaaaagacggctgatgcgattaacaaacacttaagtcagtggtttcggaaattcccgcggcacttctttaaatcgattacctttgacaacggaaaagaattcgccggctggcgcgagattgccaatcaatttgaccttcacacttactttgtcgaggttggtgctcccaatcaacgagggctaaacgaaaacaacaacggtcttttatgccgggatggcttaacgaaacagctagatttccgcaatcttcctgatgaattggtaacccaactgatgagtaagcgaaataacctgccccgcaaatcactaggctatcgaactccatatgaagtattcatgtcttacatcactgatgagcaactattttctttctaacttaaattgacatttcgggtaaataaaaaggcattcccaaagaaattgggaatgcctttttgggttgaatcaaacaagtgatagctattgattacttgttgtagaattcaacgataagagcttcatcaatatcagcgttcatatcttcacgtgctggaatgcggttaagcttaccttcaagcttgtcggcatcaaagtcaacgtatgaaggacgagaaacaacagcttccacagcgttcttgatgatgtctaagttcttagacttgtcacgaacggcgatgatttgaccaaccttaacttcgtatgatggaatatcaacacgcttaccatcaacagtgatgtgaccgtggttaactaattgacgagcttgacgacgagtagtggctaaaccaagacggtaaaccatgttatcaagacgacgttcaagcaatgccataaagttggcaccgtgagtaccttccttaatcttaccggcacgaacgaaaaggtttgagaattgacgttcagtcataccgtacataaaacgtagcttttgcttttcacgtaattgtgtaccatattctgaaagcttaccgcgacgatcacgaccgtggtcaccaggagcgtaagcccgacgtgctaattctttaccagtacctgaaagtgaaacgccaagacgacgtgaaacacgccaacttggaccagtgtaacgagacataaataaattcctccaataattttagttggagtaaaataatccgattgtgagcttggcattcgtgcaggctgatttgaatctttcaccctagcagccgggttactaaaaacaccgttaggcaccagtctgttgacgagcttgcccctcactgctgcattattttacacaaagtctagtatacaacggttcgtaataataagtcaatcttttctttagaaacctcgtaacttttttagcagaatgatgaacaatataaaagtttattaaacgaagatgttttttcatatcttttaaagcacgttcattgtggtatgctataattttgaataggattatacggataattattgtgcaagagcaataaacaataaaaagtagtaggtggaaaaagtggtttttcaagtattgattggtattttaattattgttgtagcaatattagcttgcgtatatttttatcaacgacgagctgttaaacagatcaacgacttaatggaaagcgagaaaaagctagcagatcaaaaagttgaccagcagatcaaaaatgttgaagaattgcaactaatcggggatgctaaaaagcaatttgaaacaattaaaaacaagtatgaaaaacaagtgcgaccagcgatcacagcctttaataaacgagctccccaattattagcagattcacggacgagcaagttgctgacaattaacactcagattcgagacctgcaagcagatttggcaaagttaacaacaactctccaacagatccaaaagacttacaacatcttcgtcaacaacaacatacccataagcaagcggtcgagcagattaaaaataaatatcgtcaattccaccggcaactaaatgagaagagcttcgaatatggagacagtgaaaagcagttaaatagcagattaaacgaattagaggatcaattcgctcaatttactgatttaactaataagggcgatattgaagcggctcaagagattttaaccaatttgcaatctgaaaacgataaatttgaacaagaccttaagaagattcctcagctctataagccaattgcaaccgagtttccagaacaattatccgagctaaaaagtggttataagacacttgtaaaacaaaatttccactttacggagaaaaatattgataagcaaattgaacagctccaatccaaactggatcagacgattgaccaacttaacaatttacaattagatgttgtggaacaatctaataaagatcttagtgaccagattgattacttatacggggtaatgcaaaaggaaattgatgctaagaatgaagctgttcatttgattgaagtgatgaaaggctttacaaaacacgctcaacggcaaaatgacgaacttggtgtagaattagaccggttaagtttgaattacacacttactaatcatgaacaagaaaccgtacgtgaacttggtgaacaaattaaagcaattattaagcagtaccgtgatgacgcagaagcaattgctaacaaaacagctgtttatagtcaggttcttgatcggcaaaaatctaatcaaaagaacttaactgaaattgaaaaaagtcaagaaaagcttaacgatgaagttgctaaattgcaaactgatgaacaacgtgcccgtcaaatgctgcaaaaatattccacccagattcgtacaattcatcggcaagtagaacagttgaaccttcctggcttaccaaaagattacttagattacttctttggtgtcagcgatgagattaaaaagttagctgatgaattgaatgagtataagatcaatatggatgaaattacgaagcaactaattatcgttgagtcagacctagacacattaaatgacaagactgatattcttcgtgatagtgcggaattaacagaacgattccaacaatatgcaaatcggtttagtgataacgaaaagattgcagcagcagctaaaaaatcccaagaactttttaagcagtttaactacacggcaagcttagaagcaattgcgaccgttttagaagaaatagaacctggtagctacaaacgaattgaagatacctattatcgtgaaattggtaaaaattaaaaatcaaggtgagtgggaattagcctaccgccttgtggttacgacgcgaagctagttccacgatatcttaaacaatgttcctataaataaagaggctgttgaaaaaatgaagttttttccagcttcctttttttcttattaaatgatagtgataattaatgcctaatagctaattttctgttataatataaaaccgttttaagaagagtcgaaatcttcagcagtagcctatcctatactgttgaaatcataatcagagtaggttacccatttgtaacaaccctgtgtattatttttaggaaggaaattagtatgatctattttgataatagtgcgacgacaaagatactaccggatgttttgtcgacatacgaaaccgtgagccaaaagatttgggggaatccaagcagcttacataattttggtgaaaatgcttggaaccttcaagaacaggcacgccagcagatcgcaaagttattcggggttaagcctagtgagattatttttactagtggtggttctgaaggagataactgggtaatcaaaggaactgcaatggctaagcaccgttttggcaaacacattattacgactagtgttgaacatgcagcggtaaaaaatgcattggagcaactaaaagacttcggatttgaggttacctatctcccggttgataaagagggacggatcaatcccgctgatgttaaagccgctattcgtccagatactattttagtgtctatcatggcagttaataatgaaattggaacgattcagccaattaaagaagtgggagaaatccttaaagattatccaaacattcactttatggtggatgctgttcaggcaattggtaaaggattagatgaccaagtatttagtgatcgtgttgattttgccactttttctggtcataaatttcatgctccacgaggaaccggttttgtttacgtcaagagtgggcgcaagttagagcctttgattgctggtggtggtcaagagcggacactacgaaatggaacagaaaatacacctggtaatgttgcaatggcaaaagcaattcggttagtaaaggaaaatgaagcggaatcagtaaaacgtgaacaagcaattaaagaacggatttacgaccatttaagtaaatttgatcatgtaaaattgatttctggccgcgatcaaggtttcgcttcccatgtactgtgctttgcaattgtaggagttcggggtgaaacgattgttcatgcctttgaagacaaggatatctatatctcaactactagtgcttgctcgtctaagaagcattccgaagccggaacattagctgccatgaaggttccagaagatattgcaacaagtgcagttcggattagccttggggatcaaaatacccttgaagaagctgatcagtttaataaaacatttgatgaattatacgctggctttaagaaaattattgaataaaatctgaaaggaggacataacgtgcaatatacagaaattatggttcgttatggtgagctttcgacaaagggacataataaaaagtcctttattgatcgtttaggggtaaacgtacgaaaggcccttcatagctttgaccaggtaaaggtgcatgcacaacgtgatcggttgcatgttgaattaaatggagttgactatgatcaagtgatgaatcgcttgaagttagtgtttgggattcaaaacttctcgccatcaattaaagttgataagacttttgaagcgactgcagaggcagcagcgcagatgatcgctgaacaagttgacaagccaattacctttaaagtggaaactcgtcgatcagatcaccaatttgcaattgatacctttgaaatgaacaacaagctaggaggatacctcttagataagtttcctgataaattaaaagttgatgttcaccatccagacctaactttacgggttgagatccgtcttaatgggattttcctttcaagtgaaacgattaagggtgctggtggtttgccagttggtactgctggtaaaggaatgatgatgatgtctggtggaattgattcaccagtagctgcttaccttgggatgaagcgtggcgtttcaatggaaatggttcacttctttagtccgccatatactagtccccaagctttagcaaaggccaagcaattaactgaacgtcttgcaaaatatagtggaagtattaagtttattcaggtgccatttgccgaaattcaagaaacagtaaaggaaaaagttcctgaaggttacttaatgacaattcaacggcgaatgatgcttcggttggcagctgccttaatgattaagcgtcatggtctggctatttttaatggtgaatcattagggcaagttgcttctcagacaatggaaagtatgctggcgattaatgatgtaacttcttatccggtattgcgaccagtattgtcatttgataagaccgaaattattaaaattgcccaagatattgatacctatgatctttcaattcttccatatgaggactgttgtactgtctttacaccgccatcgccaaaaacccggccaaacgttgagcgagctcgtgaatacgaaaaacgacttgatattgaagggttaatgcaacgagctcttgatgggattgaaattacggaaattcatcctggtgaagattatttaaaccaaaatgaagatgtttttgctgaattactttaattaggccttgacgaggtttgataatttagctatgatacattttaataagcattgaccgaaagagtagtaaagcggcacctaaaaagcgagatcctgagagtgagagaggattagttaaactttatgaaggtagttcgggagctgatatactgaaattaatagtaggtatgtccggttcatttaccgttatgaaatgataaagtggagtattttatactcaaattaggtggtaccgcgatgattcgtcctatcgattgtgatagggcgttttttagttaatgcacaaaataaaaatgaagattgcgttctgaaaggagtttctgccatgacagaaaaagatatgtcaaccaagtacgatccagcggcggttgaagaaggccgttatcaatggtggattgatcaaggattctttaaaccaagtggtgacaaaaaagctcacccatattcaattgttattccaccaccgaatgttactggtaagttgcacttaggtcacgcttgggatacaactttacaagatatgatcattcgacaaaagcggatgcaaggctatgatgtattatgggttcctggaatggaccatgctggtattgctacccaagcgaaagttgaagcccggcttcgtaaacaaggaatttctcgttatgaccttggtcgtgacaagtttgttcaacaagtttgggactggaaagatgaatatgctgatattattcaccagcagtgggctaagatgggtatttctgtggattatgaccacgaacgttttacccttgatgaaggattaaataaggctgttcgaaaagtctttgttgatctctacaataagggcttaatttatcgtggaacttacatcatcaactgggacccacaagcacggacggccttatcagatattgaagttattcataaggatgataagggtgcattctaccacgttaagtatccatttactgatggaactacttttaacggtaaggattacatcgaaatagccactactcgtccagaaacaatgttcggggatgaagcggttgccgttaaccctaatgatgaacggtacaaggacttagttggtaagaaggtcatggtaccacttgtcaaccgagaaattgagattattgctgacgactacgtaacacctgaatttggtactgggatggttaagattaccccagctcatgatccaaacgactttaaggtaggtaagcgtcacaatcttcctgaactgaatacaatgaatgaagatgcctccatgaacgaaaatgctggtaaatacgaaggcatggaccgttttgaagctcgtgaagcaatcgttaaggaccttcaagatcaaggttatatgttaaaagttgacccaattgttcactctgttggtcactcagaacgaacaggggtacaagttgaagcccgtctttccacacaatggtttgttaagatgaagccattagccgaagcagctcttaagaaccaagatactgatgaccgagttaatttcgttccagaacgattcgaacacacctttacgcaatggatggaaaatattcatgattgggttatttctcgtcaattatggtggggtcaccggattccagcttggtataacaaacagactggcgaagtttatgttggtatggaagctcctaaagatgccgaaaattgggaacaagataaggatgtccttgatacatggttctctagtgcgctttggccattctcgacgatgggctggcctaatactgattcagcagacttcaagcgctacttcccaaccaatactttagttactggttatgacatcatcttcttctgggtttcccggatgattttccaatcgcttgaatttacgggtcaggcaccatttaagaatgttcttctccatggtttgattcgtgacgaacaagggcgaaagatgagtaaatccttaggaaatggtattgatccaatggatgttatcaagaagtacggggtagatgccttacggtggttcttaattactggttcaactcctggtcaagatattcgttttagctacactaagatggatgcagcttggaactttattaataagatttggaacgctagtcgttacgttatcatgaaccttggtgagatgcctgctcctgtccttcctgataagagtaagtgggatttagctgatcggtggattttgagtcggttaaatgcaactgtaaagcaggttaacgaacagtttgacaagtttgaatttggtgaagctgggcgggcactttacaacttcatctggaatgatttctgtgactggtatatcgaaatgaccaaggagaaactcaataatgggactgacgaagaaaagaatgatactaagaatattcttggttacgttcttgatcagaccttgaagatgttacatccaatcatgccattcgttaccgaaaaattatggcaatcaatgccgcatgatggtgaatcaattatggttgcagattacccagttgctaatgccgaacttgatgatccagccgcaactgaacaaatgaatagtttgattgaattgattaaggctgttcgtaacattcgaaatgaagctaatgcgccaatgtctaaaccagttgacattttggtaaaagttgatagtgatcacttggcacagatgttgaatgataaccgggattacattgaacgcttctgtcatccagagaacttaactattggtaaggatgttgaagctcctaagcttgcgatgagcggtattttgactggagcagaagtttacatcccaatggctgaattagttgaccttgatgaagaacgagatcggatggaaaaagagattgctaaacttgaaaaagaagtagaacgttcacaaaagaagcttggcaatgaaaagtttgttaataatgcgccggaaaaagttgttgaagctgaacgacaaaaggcaacggaatggcaacaaaaattagcagctgctaaagaacgccttcaatcacttcaacaagcttagcgtcaatttatagtaggataattaacatttttaataataaatgaaaattatatcattttattaaataggttagactactgtgagaatgctattagctttaatatttataaatatagtttaaaattagattaaaaaggaattggcaattgctgattccttttttgattaatatgaaaaaataatcatgcatcgttcgaaaatgtttatctactgataaggattaaataattgataattaagcggtttatttagagattatttcacatatttaccatttatttattgtaattatttatcacaagtattatgattgattgtggagaaacaggaaacggtttcaactattctttttatcgatatacttcggagggaggtatttataatgactattcttagtctggcacgtttccaatttgccatgacgacggtttaccacttcttctttgttccgttttcgattggaacagcttttatcgtcgccattatggaaagtatgtacgtctcaactaaagacgaaacatacaaaaaaatggcaaaattttggggaaatattttcttacttagttttgcggtcggtgttgttacaggtttgattcaggaattccaatttgggatgaactggtcggattactcacggtttatgggtgatatctttggtgctccattagccctcgaagctttgctatcattctttattgaatcaacatttattggcttatgggtatttacctggaaaaaggttaagccagggttgcaccttttcttcatttggatgacaagttttggctctttaacatctgctttatggattttaactgccaactcattcatgcaacacccagttggttatgaaatcaagggtggccgtgcagtaatggttaattttggtgcattgcttaaaaacccccaattatggtatgaatttggacatgttatccttaacgccatcatgatgggtggtattattattgctggtttaacagcattccaacttctcaagaaccaaaaactttctgaagctaataagaagttttacaagaagtcaatgcgtttaggacttttagtatcattgattttctctattggtggaattgcgttaggggatgcccagatgcaatacttaatcaaagaacaaccaatgaagtttgcagctactgaagacgtattcacgactactggtaagcatgcaccgtggacaattgttggtattgctgatatgaaagaccatgaagtaaaaggcaatatcgatattccctatgccctaagtattttgtcataccacaaaactactggtgcggttaccgggatgaatgagctcaatgcccaatataagaaaaagtacggcaagaatcttgattactacccaccagtaaatacgctgttctatagtttccggattatgtgtgcagtcggtgcttggattttcttagtttcattagttggattaattatgacaagagaaaagagcaagaaaccacttgcacaacgccgctgggcactttggtgtattgcaattaccactttcttaccatttatcggtaatactgctggttggtttgtaacggaatttggtcgtattccatggacggtttatggcttgtttacaattgctgaaagtgtatcaccaaatgtttcagttggatcattgttaacatcaaatattgtttacttcgtattatttacaactcttgcaattacattaatttggttaattgttcttgagttacgtaaagatccatcggaagcaattgaacctaaattcaagaaggttcttgacccatttgacaaggaggcgttctagatgagttttcttcaattattatggtttgtattgattggagtgctttttgctggcttcttcttcctagatggatttgattatggggtaggaatggcggtcgaaacacttgctcataacgaatcagagcgtgatcaacttgtgcggacaattggaccagtttgggatgcaaatgaagtatggttaatcacggctggtggtgcaatgtttgcatcttttccatattggtatgctagtcttttcagtgggtattacttaatcttaatgattatcctagctggtttaattatccgtggtgtttcttttgaattccgtaaaaatagtccaatgtcacaaaagcggatctgggattgggcattagcaattggtagtgcaatcgttccatttttccttggtattatgtttgttagcatgattcatggaatgccaattgatgctaacggcaattttcacgcaggattctttgactatttcaactggctttcagttgttggtgggattgccttattgcttttaacctacttacatggaattaattatattgccttaaagacgactggtccggttcaggaacgcgcccggaactacgctgaatttttgtactggattctttatgctggcgaagttgtctttgcactattattaatctttatgaccgactttatggctgttcacccagttggcacaatcattatgcttatattgattgttggtttctcagttttagcccaagtagaaacctttgctggtcatgaactaattgcctttatttcaagtgggttaaccttagtatctttagttgtattgatttttatcggtctcttcccacgggtactaattagtagcattagtccgaagtacagcattcttattcaaaatgcttcctcaacagaatatacgttgacagtgatgacgattgctacttgctgtcttttaccatttgttttggcatatacaatctgggcttactggattttccgtaaacggattgcaatgccagctattccggaggttaaataaaaagttatgattgatcgactactcttcaaaatcgagggagcagacatatcatgattaagcttgtggggctttatgtcctgcaagcttttcttatccttggtcagggattaagtttggctgctttactaacaggcttatggcagggacattctcttttaagtcaaatatatggcttaggtggatttattgtttgctaccttttgcgtcatgggctaaccgaaattgggaatgattggcttgataagtattcggctaatgctgcccaaaactttcgtcagcaattattaaaaaaagtctttgcgcttggaccggtaattgttcagcgggagggaaccggtaatatggttactctcgctcttgatggcattaaagaagttgaaaattatattcgactcatctatagcaaggtgatcagcatgatgattattccagtcattattttggttgtctgtttttggctcgattggatttctggcattgttatgttgttagtttatcctttgattgttttattcatgattattttaggctatgcagcgaaggctaaggcagatcgacagtttgcagcttttcaaatattgtctaatcactttattgattctttgcgggggattgacacattgaagtactttggccttagtaagaagtattcgcaaagtatttatcggtcaagtgagcgttttcgcaagtcaacaatgagtgtgattaaagtagcgatgttatcaacgtttgctcttgatttcttcactacattagctattgcaatcttagcagtctttcttggcttacggttaattaacggtcacttattgctattcccgacactagcaatcttgattttggcaccggagtattttttgccgattaggaactttgcaagtgattaccatgcgacgttgaatggtaaaaattcatttcatgcggttcggcgaattcttgagatgccattaccaaagaagccgactgttgaattacaccagtggacaggagtcgatgggttaagttttgagaatgttgagtttatgtatcctcaaaatggcagtgaattaacaaaccttgatttaactgttaaggggaatcaaaaaattggcattattgggatgagtggggccggaaagacaactttaattaatcttttaagtggctttttagcgccgacaagtggccaaattaccattcaaggaaaaaaagtaacgactttggatattcatgactggcaaaaacagattctctacattccacagactccctatatttttgcagatacgttaaaaaataatattgccttttatactccaaatgtcagtgaagacaaaataaaagaagcgattcatgttgtcggcttagatgatcttgttgctgaattacctcaaggattagggacgatgattggcagcggccaccgagcattaagcggtggacaggcacagcgaattgccttagcacgagcatttcttgatccagaacgtcgggtaatgatttttgatgagccgaccgcccaccttgatattgagactgaactagagttgaaaaaaagaatgcttccgttgatggaaaataggttagtcttttttgctacccaccgtttgcattggatgaagcagatggactacattttagtgttgaagaatggcaagttaattgaacaaggaacgtatcagcagttgcttgatgaacatggttactttacagaactgatggaccaaacacgcggaaaggagataacccatgaataagattcctttacttaaagcaatgaaacatgatcggtgggtgaaacccttcctaaagcgttacaagtggaccttggtattagcaattaccctggggattgttacctttatttgtgctagtggattgatgttcaccgcgggctatttaatcagtaagtccgcaacgatgccttttaatattttgttagtatatgttcccatcgttcttactcgtgcctttgggatttttagaccggtgactaattattttgaacgattggttagtcataattgggtttttaaaatgacttctgcatttcgtaaaaagctttatgattcgttagagcaggatgccgttttctttaatagtaagtatcgaattggagatattcttgggttactttcagaagatgttgcccacattcaaaatttatatttacgaacgatttttccaatgttggttgcatttgggctttatgccattatcgttattggaatggggataatttctccactaatgggtcttttaatgttaattctatttgggttaatcatcattgctgttcccgtgtggtcagtgcttgttaatggtgcacgccagcaactagaaaagcaatataccaataccttgtatgctgatcttactgataatatcatggggattacagactgggtatttgcggggcgcagtgcggattacctgcagcactataataaaagtgagaaaaacgtactagcatctcaaaaagcgatgaaacgttttgagcattggcgtgattttattcttcaggtaatgattttattggtggttgttagccttattgtatggggagcagcacatttcggcggtcattggggaggcagtgcaaattggattgcggcctttgttctttgtgtctttccccttgatgaagtattgtctagcttgccagcagctgctcaagaaactaatgtatatacggattcattaaagcgattgaatgaattaccacaaccgcctgctccttctaaggttaatattgagattgccgctccttatcatcttaaaattacagatgtttattatcgctatcctaaaacagagaagatgatcttgcgggggattaatcttgatgttaatccaggtgaaaaacttgccattcttggtcgcagtggggctggaaagagtacgttagctagtttaattcgtggagaccggaagcctacttcgggcactgttactcttaataatgtgccaacgggtgaatttggtgatgagatttcgaattatattgggatcgttcaccaatcgccatatttgtttcataccacaatcttaaataatattcgtttgggaaatgaagatgcgacagaggatcaagtatgggatgttcttgaacgtgttgggttggccgctatgattagacgactgccaaaaggacttcatacgatggttgatgaggcagggttacggttttctggcggagagcgtcaccggttgtctcttgcccggattttactcaaggatgcgcccattatccttttagatgaaccaactgtaggtttagatccggtaacagaagaaaaggtaattgagacttttatggagcagctacaaggaaaaactttgatttggattactcaccatttacaaggcatagaaatgatggatcaagttgtttttatcgaggatggtaaaatttcaatgcaaggcagcccggcagaattacaaaaaacaaatgaacattaccgggcgttaaaaatggcagatgagggtatctagctagtttaggaatgttataataaagtaggactattaatgaagggatgaatagtaatgaaagaagttgttgtacttggagctggttacgctggcttaaagacggtcgtattattacaaaaaaagctaaaaaataatgttcatattacactagttgatcgtaataattatcattatgaagctactgatttacacgaagctgctgcgggaacgcaaagtgcttcaaggatcacttatccaattagtgatgttattaatccacaaattactacctttatccaagatgaagttgtaaagatcgatcctgataaaaagacagttaaacttgctggtcatgaagagctactgcactatgattattgtgtattaggactcggctttgtttcagaaacctttggaatccctggtgctgaagaaaatgcattaccgatgactaatgttaaagaagctttagcaatttatgaccatatcattgccaaaatgaaagattatcgtaccactcacaatcctgatgatcttcaaattgttatttgtggtggtggatttactggaattgaattagcaggggcgcttgttgacgctcgagcaagttatgccaaaatcgctggagtttcaccagatgaaattaaaattacgctgattgaagcttcaacaagattacttccaatgtttagtgaaaaacttgccgaatatggggtaaaccttgttaagagccttaacgtgcaattgcttgatggttcacgaattagcaagattgaacctgggaaggtcatctacaagcatggagatgatgatgaagagtcccttaatgctggtataattatctggacaactggagtaagtggtaatccattgatggaagaatgtggctttgatgctaagcgtggccgggtaatcgttactgaccacttaacagatcctaagcacgatgatatttacatcattggggatgttgctgccgtaatgccaccggatggtaaacgcccatacccaactactgcacaaatcgctctagcaatggctgattacacggctgaagacattgttagccgtattaagactggcaagcatgaagctaagccatttacttacaagtccttaggaacagttgcttccgttggtaatacgcgggcatttggtgaagcaatgggtcatgaattacgtggatatcctgcttcagcaatgaagaaaattattgctgaccgttccttgttagaaacaggtggtttgaaagagctatttgctaaaggacgctttgacttatatcactagaaaatgaatgaggctgagaaaaaacttttgtttttcaacagcctcgtttttatgcttatatgctaaaaaggtatggttataataaataaagggtgaaataaatgattaaaacttatgatgaagcattatcttttattcatggacgaacacaattcaagaaaattccaacactcacacggatgaaacgattcttggcagaattagggaacccacaagaaggacttaaatacattcacgttacaggaactaatggtaagggatcaaccgttgcaatgatgcggtctgctttactggaaagtggccttactgttggaagttttacatcaccttttattacacgatttaatgaacgaattgagtataatggaatcccaattagtgatgatgatcttttaagattagttcaaaaaattgcccctgttgtcaaaaaacttgatgatacattagaaacaggcggtccaactgaatttgaaattgatacagcattaatgttttgctacatggctgaaaagaagcccgatgttatattgcttgaagtggggattggggggctatacgattctactaatgtaattacgccagttgttagcgtgatcacgacagttggctgggatcatatgaagtatttaggtgatactttagctaagattgcggctcaaaaagcaggaataatcaaaaaaggtgtcccagttgttttaggtgctctcccaacagaagcgcgcgaaactattctcgcagatgcaaaggagaaaaaatccccggtttttgaattaggaaaagactttactgttcacaaacttaatggtcatcagttccacgcaaaaattcggtatcaaggaaaaaatctgaaaaaaatagaaataattcttgggttgccaggcgactatcagatagaaaatgcagcagttgctttgatggctcttgagctttttatggagaagcgtgggctggcaattgatcgtcgtgctttgatagcgggattagaaaatgctgcttggccggggcgattagaagaaataaatactactcctctggtcttactagatggcgctcataatcttcctggtgtccaggccctggttcatactattaagaatgattttgccgatcgggaagtttacctcttggtagcgattttggctgataagcaatatgaattaatgcttggggaattagcaagcttggggaatattcacttaactgttactcactttgctggccccggtccaaaaagaccaagtgcagacttagcaaaagcagttgctgatattccaactaaatatcccatccagattattaacgactggcgattaggaatcgggcaggtggcaagtcaaatgagtgcggacgatgtaatgattattactggttctctttattttgtttcagatgttcgtagattctttttaaattaaaagtgtaaaagcacaaattttccgtatttaaatatatagagtgtaaaaaggagaattatttatttatggaaaatgaagtgattaacgaatatacaaaattagtctggacggctattcctgataaaccgggaacaaagaagcaggaattatgtcaacgtttcttacgtaagtgtcctactcccctagcaattaaacggctttcacgtattgaaaaaaatgagataaatgaatgggcgccagaaatgcttaacttttttgctgctattgaattagggaagatagtaactaaaagtcatgaagaaattattggccatgcttattcgagtatcgaattaggacgcaagatggttgaccattttcaaagtgaagagcaagaaagtgtttgtattgcctgtacagatatccataatgagataattgattggaaaattttgtttgtaggcggcggatgcgaatgtattctttatcctgataagatttttcaatatgcgctccggtgttcagctcaaggaattattatgatccacaatcatccgacgggagacattcatccttctaagcaagatgaatcttttactcgccgcttagaacgaggatgtgagattattggacttcatttagttgactttatgattgttggtcgtgatacataccatagttggcgtgaagctagtctcgttaatgagcttaaaaagtaaagaaacttttaatttattataataattacgctttctttgttcttattaatgtatattaatgttcgtatgtaccgagtggctatggtataatatgcacgatattaatttgattttaagacgaagggaagaagcagattgctaggaattggaacaaaaaatcttggcattgaccttggaactgctaatacaattgtctaccttgaaggtaagggtattgtattaagagaaccatcagttgttgctcgtaattctaagactaacgaagtaatcgctgttggcagtgatgcccgtgatatgatcggacggacgccagaaagcattgtggctatccgaccaatgaaagacggtgttattgctgattacgacacaacggttgcaatgatgaagtattacattgataaagcactaggaaataatggtaagccatatgttatggtatgtgttcctagtgggatcacggaagttgaaaagcgggcagtgattgatgctactcgagttgcaggtgctcgtgatgcttatgttattgaagaaccatttgcagcagccattggagctggattaccggttatggatccaaccggtagtatggttgttgatattggtggcggtactactgatgttgctaccatttcattaggtggtattgtctcaagccggtccattcgaatggcaggagataagatgaatgatgcaattgttcaatatgttcgtcaacatatgaatttattaattggtgaacgaacagctgaaaagcttaagtgggatattgggtctgcatctgttgaagctgctgaagaaatgggaacaacacaagttcgcggtcgtgatcttgtaactggattgccaaagacaatgcaagtatctgcgaaggatgtttcaacggccctccaagatgttgttgatagtattattacggcaattaaaggaacacttgaagaaacttccccagaaattgctgctgatgttattgatcacgggattgtattaactggtgggggcgcattattaaagcatttaccagatgttattgcagatgcaaccaaagtaccagtatttattgctaatgatccccttgactgtgttgctattggtaccggcgagtcattaaagagtattgatgtaatgaagaaaaagtaaaatgattctctgacagtgacgttagcgatgaatcatcattagtactaactaatgattaacggggctgagtgccaagcagaattgtttggcaggccccgtcttaattaccttgtgtatgcattggagggtcataatgcagaaatttttttccaatcgccgattagttattgctgtgataattctagttgtctgttttggactaatggcaggttctgtttctttacggaatagacgaaatacaccaccgattatccaacaatttggaaatgatattgttggctttgttgatagtgcagttgctctccctgtaaattgggcacagacaagtataagttcaataaatgggttgatgaatacttattctgaaaaccgtgaacttaaacagcaagtaactgaattagcacaaactaaagtccgtgatcagaccttagctcatgaaaataaacaattaaaacaacagttaaaacttaataattcaatgaccgactataatacagttacagcggctgtgttaatgcgcacaccatcttcatggcaacgacaactcgtaattaataaaggtcaatctagtggtattaagaagaatatgcccgttatgagtggtagtgggttaattggtcggattacagaagtaaataaaactaatagtaaagttgaattattgagtgatactagtgaatcatcaaaccgttttgcaattacccttaatggtcaaaatgggaaggtgattaacgggattatcaccggatataatgcaagaaataacgagcttgaaatgggacaagtaacttctaaagctaaaataaaaaagggtacccgagtagtaaccagtggaatgggtggtgtgacacccaagggactttacgttggtcgcgtgtcgcatgtcggtaaagatgattatggcctcgcccagaaaatctatattactccagcaacggactttaatgatattaatattgttacagttgctgaagcggcttcgcaggagtgataaattatgtatcgtttatcacgcttaaaatatatattcccaattggcttatttgtatgtctgtttttggacggagccttaagccatgtgtgggcaccattatttttcagttatccctattcaatggtgagtgaacttgtcttactatggttagtcttatcgtacttctttcaagatgatattgagattccattaattccatttgcaattgctgctggtgcagtttacgatttatacttttcgggaattttaggattgtatattttcttgtatccattagtagtcgaaataactaaaattttatctcgttattttagttcatcatttctttcgatgattatgattttctttgttgatattgtcatttttgagacgtttaattattgggcatattatttagtgaatattactaatgttggttttggcgactatcttatttatacgcttgctccaacgttagcattgaatttaatttattttgttgtcctcttctggccaattcgcgcaatatatcgctgggcattagacgatgatcaaatttaaaattagtgcttgacacaatagatattccagtataggatatttacaacatcataaatgacagtgaacagactagtagagctttaagcattgcaaagagagtccttaatgatgggaagggatcgatgctttggcttgaatcacatctgtgagttggccttctgaaagccatagtaggaagacccggggaagcccgttacagcgcggagtttattttaatgaactcactaaggctattattcgtgagaaaatagcaagatgaggtggaaccgcggaaacgccctcgtagccattttaggctcgagggtgttttttgtttcattaaaatagacttattaaggcaaatattgtgaaatgtttgtaaatatgaggtggaaccacgatgtactcgtcctctaggaggtatctcctagaggatttttcttttcctgttatttctattagtcaagaatttaaggaggcaatagtaaatgtcaatgcaatatataagtgaaattctaccttcattattccaaggggctgctcttacattacagattttcttctggacattagttggatcgctgccattaggaattttggttagcttaggacttacttctaaaattaagcctttgaagtgggtgttagaaatttatgtttggttaatgcggggaacgcctttgctacttcaactaatctttgtattctatgggttaccaattattggcattgtttttgaacgttacgatgccgccctagttgcttttattttgaactatgcagcttattttgctgaaattttccgtggtggtttccaatctgttgatcaaggtcagtttgaagcagctcgtgttttacgcctaagctactggcaaacccttcgtaaaattatcattcctcaggtaataaaaattgttattccatcaattggaaatgaagttattaacttagtaaaagattcatcgttagtttacgtaattggtcttggtgatttacttcgagcaggaaacgttgcaacttcacgggatgtcacacttgttccattgatgttagtcggattaatctatttgatccttgtaggaatttgtacattaattctacggcaagttgaaaaatgttatgcatacttcaagtaaaggagggaatctaaatgttagaagttcgagatttaaaaaagagttttggtgatcggcaaattttagatggggttaatttaacagttaaagatggtgagattctttgtattgttggtccatcaggtgctgggaaaacgaccttacttcgttgtattactggactggaaactcccgatagtggtgagtttttcattaacggtcgtcgctttgatcctcagggaacagatgcagctgaccgagtaatcggtgtggtttttcaagactttaagcttttcccaaatctttcggtaatggaaaatatcacgttagcgccgatgatggtattgaaaaaggataaacaagaagcaattgctgaagcgcaaaaactgcttgaagaattagggcttaataccaaaggaaaattgtacccctaccaactttcgggtggacaaaagcaacgggttgccattgctcgtgcattagcaatgaagcctaaaattttgtgctatgatgaaccaacatcagcgcttgatccaaacctccgaaaagatgtggctaatattattttgggattaaagaaggacggaatgactcaattaattgttactcacgatttagaatttgcggaagatattgctgatgatattttacgagtacaaccacttgatcaacgtcagaataaatagtgaaaggagatatactgatgaaaaaagcgaaagcaatttggttacttattttgttagtagtacctgttctccttcttagtggctgtgaaagtgtaacaaagcgtgctgatacgcaagatacatggaaccggattgagcgccgaaaaagagtaattgtcggccttgatgacagttttgttccaatggattttcgccaaaagaatggcaagctggttggttatgacgttgatcttgcccgggctgtttttaagcagtatggaataaaagttgattttcagccaattgattggtcaatgaaagagactgagttaaaaaatggtacgattgacttgttatggaatgggtattctgttaatcctagccgtgccaaaaaagttgcctttagtcgttactatttagagaatcggcagatattagtaactaaaaagaagagtaacattaaaaatctgaacgggatgacgggcaaaacactcggggtgcagaatggttcaacgggagtaaccgttttggatgagaagccaaagttattaaaggataaaataaagcaccatacaccagtactttatgatacatttcctaatgcatttattgatttaaatgcaaatcgaattcaaggaattttaatggacgaggtttatgctaattactatattaagcaccaaccaaatagtaattcgtatcgcacttatattagcaaagagctgccaatggaacattttgcagtgggaatgcgaaaaggtgacaagaccttaaagaagaaaattaatcaaggcttaggtaatttgcagaaaaatggtgaattacggaagcttaatgaaaaatggttcggtcaagataataactacttgggaccggataacactaaataaaaagagcagggacttaggaaatagtctctgccctttattgtttcctacaaacaaattaataaaaatatgatgaatttacgtaatcggtttgtaatttagtcatatttaacgtatcattattcagtatgataattcgaatgtaactaggttgcagctagtggaacccctcttgctgcattttatattgaagggagaaagagaacgtggattttaatcttgctcgtggcgtggacttgcacattatacccacaaaacaatttaagatgaatcacgtcttaatagattttgcgactccgcaaacaccgacgaatgctactgcacgaaatttattggcaaacctattagagaccagcacgcatcgctatccaacacagacggctttggctcgtcaactggcatctttatatggtgcttatgttaatttatatgttaaccggctggggacattgcatactgttcgattgcgagcaagttttgttaatgatcgctttgttgatgaagatttatttgaaaagattagtagcttaataaatgagatcattttctatcccctaatcgatgacggggaatttgatggtcctacttttaggattcaatctaataatttaaaaagtgcgataaagtcgctttatgacgataaacaatttttggctaatcaacgtcttatggacttgtactaccaaaatgattctgtaatgaaggttcctagtttcggtcaaattgctgatcttgagaacttaaatgctaaaagtttagtgtcaacgtatcattcaatgattaatgaagataaaattgatattttcgtgttaggtgacattgatccgatgcgtgctcagcaagttattgctaagttgccttttaaagatcgcgatattgctaataattcacctttatatcatcaagcattgtatgatcaagttcaaagaaaacagaataccaacaagtaaatcaggcaaagttaaatttggcatattctttacctgtctattatcatgatgctgattactatgctggtttggttttcaatgggctttttggtggcacgccatattcaaaactttttacgaatgtccgtgaaaaagctagtttagcttattatgcctctagccggctccttccatttaatgggattataagtgttcaaacgggaattcaagcgagtgatcaagaaaaagttcaaaatatgattcaggaacaattgactgccttgcaaaatggtgattttactactgagacgctgagtgaagttcaagatagtttgattaaccaataccgtgcaggtcatgatttggcaagtaatgttttggagcaacaattagttaccaaattagtcaatgaatcggataagaactttattactgaaataaaaaaagtaaccatagctgacgtcatgcgcgttgctaaacaaatgaaacttcaggcagtttatttattaagtggtgagaaataattatatggatagagaagtttatcaaaaatttaaccagtccatttatcgtgaacaattatcaaatggtttgaaagtccagctcttaccaatggaaggctaccataagacatatgctattttaacagctgattttggctccattgataatcattttataccgtacaatcaaaaggaggcgattactgttccagacggggttgcccacttccttgagcataaaatgtttgagaaaaaagatcatgatgcctttgatttgtttggtaaactaggagctgattcaaatgcctttactagttttactcaaacaagttatcttttttcgaccactagtaacctccatgagaatttagatgttttgttagattttgttcaagatccctactttactgcagagacagtgaaaaaagagcaggggattattggccaagaaattcaaatgtatgaggatgatccgagttggcggctttacctaggtattttaggcaatttatatcccaaagatccaatgcggattgatattgcgggaacggttgaatcaatcagtcatattacaccagaaattttgatggatagttaccggactttctatcaaccaaccaatatgaaccttttccttgtaggacgcttagatccagaagaaacaatggggtggatcaagcaaaatcaagaacaaaagatttttgctcccgcagagacaccccaacggttatttagcttgaacgatccaactgctcatgatgtaattccatttcgttcattaacgatggatattgttcgtcccaaagtgatggtaggtttacgggggaccaagcaatttgatgatggtaaagaacggctccactacaaattagcaattgatcttttgttagatgttttgtttgacgatacctcagataattatttgcgtttgtataataatgaaacattagatgacacgtttagttacaattttgaaatgcaacggggctttcactttgcgtactttagctctgatactgatcagatggaacgctttgcagatgaaatcattgatattcttgaaagtgctgaccagcaaattgaagcggcgcggacaaggtttgagggaattaaaaaggcagaactagggcggttaattggcttattagattcgccagaagcaattgctaatcgttatgctggaaacctctttgccggtgctagcttgatggatgagatagcgaccttggaaactatcacgattgatgatctttatcaagttgcaaaagagttcattactcctcaaggtatttcggtataccaagttgttccgcaacatcaataaactaaacttttcctatagatttattccgataagctaatatataattgagcatgatataatatccaagagtaaagataaatgaaaatggagatagaataatgagtgagaacgagaacgatcaaaaacgactagaaatcggtaaaattttacgaaaagcacgggaagaaaagggctatacccttgatgaccttcaacaaatgactaagattcaaaagcggtatttaatcgcgattgaagatgaaaattttgatgaacttcctggtgacttttatgttcgtgcgttcattaagcaatatgccaatacagtgggcttagatggtaatgaattattgcaaaaatacgatgatcaattaccacagactaaaacggaagagtattccgaccacttggctcaagcagttgaaactcgtgcaaaccaacgaaaaactgttagtgggagcgtagataaagttcgtaactacatgccaacgattattattgcttgtgtgattgttttagtgttggcagctatttggattacggccattgctcgcaatcatcgcgattcttctacacggattgataatagttcagtatctgtttctggagagagtcgtaagaaggcctctacctctgctaaaaaggcaagtacaaagcaaagcaaatcaacggcaatcaagcttcaagaagcacctaatcggaatgacacaagcgttacttacacagcaagtcaacttactaaagacacaacgctacaaattgaaccaagtgatcgttcttggatgcaagtaagagcaaataataatgatttattaaacagaactttgaataacaatgaaaaaactagtgtgaaaataagtcgtgatacaacttcattaataatcacggttggcaatgcccgggcaacaaaattaaaactcggtaatcaagaaatcgactttactaataatggccgttaccagaacacgcggaatgtaacgattaactttggacgtacccaaacaagcagcagttcagcaagtcagccgtcaaatagctcaagccaagcttcgtcatcctcggcacgtcctaataatgctactcaaccgtctgctgctaataataacagtcgtcctcagacaaatgctagtcaacaaagtaatcaaccaactcgttaattaagaggactaaaggagttagaacattgaatttaccaaataaactaactgttatacgtttaattattattccctttttcttattattaatggtgctgccattacaaagttggggagctgtaagtttttggggagcaactatcccgatggctcagcttattgctgctattttatttattgcagcaacaattactgataatcttgatggacaaattgcgcgacggcaccatcttgtaactaattttggaaagtttactgatccgcttgctgataagttgcttgtcatgactgcatttatcgttttaactggaaatggtgttgttccatcatgggtaacttcaatcattatttggcgagaattgtctgttacgggcttacgtttattgttagtggaacaagacggggtagtattagctgctaaaatgccggggaagattaagacaactactcagtttattgcaattatcttcttactcttaaataatgttatttttgctatttggaatattccatttggccaaataatgttatatatttgcttgttctttactatttattctggagtggattacttcatccagggacgcgatgtcttttcggatggatttaaatagaatatggagggtgagaaaaaacttttgttttttctcaccctcatgttttttatattcatagttttaagattttagtgaaaatgactatactttacgtatatatattaataggggatgaagttttatggatgcagaaattatctcagtaggaactgaaatagtccttggacaaatagttaatactaatgccgcgtacttagctaacagactaacccaacttgacttaccggctacttatcaaacaactgttgacgatcaatcacagagattagagcgggttattaattacgctttgactcgtgctcaattagtttttgtttgtgggggactcggaccaactgcagatgatgttacgatgcctacagttgccaaagtcttagggaaagagttgtggactgacgaagaacactggaaatggattcaaaaaacatttgagcaacggcaaataaaaatggaaccagagaatattcgtcaagcccagtatccacggggaggcgagccacttgccaatcctgttgggcttgctctaggatgttggtatgaaactaagggtaaagttgtggttgtcttaccaggaccacccgccgaatttaaggcaatggttgaaaagagtctgattcctaaactccagcaatattttcaaacaggaaaacaaattaccagtcggacattaaactttttagggcggccggagtcacaattaatggatgaaattgaagaggctactaacgatataccagggataagcattacttcttatgttcaaccaacggcaattcaggttcgactcaccgtgcgtgacttaccagtggttgaagctgaagaaaaaattgatcaggcacaaagagcaattcttgcagttgaagaaccatttttctttggagcgggggatgaccttacacttgccaaagtcgtcgttgaacaattaaaaaatcgcggatggaaattgacagcagcagaaagcttaacaggggggatgttccaaagtactatttgttccgtaccaggagcctcgactgtttttaatggtggttttgttacctatgctgctagtgcaaaagaaaagttattaggaattccccacgacactattgaccaatatggggtagtgagttctgaaactgctgcggcaatggcagaagggtgtcgacgaaaattaaatgttgaagttgggattggctttactggtgtggccggcccagatatgttagaaggacaaccagcggggacggtctggattggactagcaatgaagggatgcccaactaaaaccgttcaattacatcttgcatcctatgttggaagacaggcgattcgtacattaagtgttcagtatggacttcaattaatttaccgtgaactaaaaaaataaacgaacttttgttcacttttttcttgtttttttggctaaaactgttattattagttatcggataaaccgtaaaaaaaggaggaatttgatttggctgaccaacgaaaagcagcattagatgttgctatcagaaagatcgaaaagaacttcggtaagggctctattatgcgaatgggtgacgccactgatatgaaggttgcttcagtttctagtggttcccttgctattgacaaggcacttggaattggtggatatcctcgtggtcggatagttgaaatttatggccctgaaagttctggtaagactactgtagcattacatgcagtagcagaagtacaacgtcaaggcggaacagcagcctatatcgatgctgaaaatgcgcttgatcctcaatatgcagaagccttgggtgttaatattgatgacctattgctttcacagcctgatagtggtgaagaaggattggaaattgcagatgcattgatttccagtggggcagttgacttagtaattgttgattcagttgcagcattagttcctcgtgctgaaattgatggtgatatgggtgatacccatgttggattacaagctcgtttgatgtctcaggctcttcgaaaactttctggcgaaattaataagacaaagacaattgccatctttattaaccaaatccgtgaaaaagttggagtgatgtttggtaaccctgaaacaacaactggtggacgggcacttaaattttactcaactatccggatggaaattcgtcgtgcggaacaaattaagaatggtacggatgttattggaaataaagctaaagtaaagattgttaaaaataaggttgctccgccattcaaacggtgtgaagttgacattatgtatggtgagggaatctctaagactggtgaattgctggatatggcagttgaaaacgatcttgttgacaagagcggtgcatggtactcatatggtaatgagcggattgggcaaggtcgtgaaaatgctaaaaagtggcttaaggaacacccagatagcatgaatgaattaatggataaagttcgtgttgcaaatgggatggaaccgttaaatgaaaagtcaacgaaagaaactgctgatgataaagccagtggtaagaccagtgaaaataaacaagaaacaattgaagaagcaagtaaagaataaataataatatttgaagttgaaattccctaattttttagcattaatagctgaatattagggatttccctttttatactggctgtttaagcaattgataaattcaatagttgacaccttagtgtggcaagattaaaatttaacttgtgtgatgttttttgacgttacacggtgaaattaatttattcataccaacaacataatagttgaagcggaggtgaaatagtgaaaattttaatgttcgccgcgcttgctatggttgtcggaattattgtcggctatgtaattcgcaaggtttcatatgaaaaacaagttgcagaagcacataatgatgctaaaggtattatttctaaagcaaaacaagaagcagtaacggcgaaaaaagaagctattttagaagcgaaagaagagagtcatcaataccgcgagagagtggaagatgagttaaaacagcggcggagtgaggtccaacgacaggaagaccgattactccaacgggaggcttctttagatcataaggatagcgctctagaaaaaagagagaatgcagttggtgttcgtgaacgtaaattagatcaagaaaaagagcagcttcatcaatcaaaggaacaagcagaagccttaattgaacaacgcaaacaagaagttgaaaaagttgctcaaatgtcacaagaagatgctaagcagttattattatctgaagtaaaagaacagttaaaaactgaacgagcagtaatgattcgtgacagtgaacaagaagcggaactttctgcagaacgtaatgcaaagaaattaattgttgaagcaattcagcgtagtgctgcggatgttgtctcagagacgactgtttcggttgttaatcttcctaatgatgatatgaagggaagaataattggtcgtgaaggtcgaaatattagaactttagagacgttaacaggtattgatttgattattgatgatacgccagaagctgtcgtattgagcggctttgatcctgtacgacgtgagattgctaagatcgcgcttgaaaaattaattcaagatggtcgtattcatcctgcacgaattgaagaagcagttgataaggctcgtaagcagatggatactcaactacgggagactggtgagcaagcattgtttgatctaggaattcattcaatgcatccagacctaattaagacggtcggaagaatgaagtaccggactagttacggtcaaaatgtcttagaccactcaatcgaagttgctaagttagccggaattatggctgctgaacttggggaagatgttacattagcaaaacgtgctgggctcctccatgatattgggaaggcaattgatcatgaagttgatggttcacatgttgagttaggtgtagaactaacccgcaagtataaagaaaataaagtggttatcaatacgattgcttctcaccatggagatgtccctgctaattctgtaattgctgttcttgtacaagcagcagatgcaatttcaggggcccgtcctggtgctcgaagcgagtcattagaacaatacattcaacgtttaaagaaactagaaagcatagcaaacagttatgatggtgtcgaccatagttatgcaattcaagctggtcgagaacttcgcgtgattgtcaaaccgaagaagatttctgatttgcaggcaacaactttgtcacatgatattaagaacaaaattgaaaagcaattagaatatccaggacatattaaagtaaccgttattcgggaagttcgagcagttgattatgctaaataaactgatttttcagttcctataaagaggctgggtataaccttcagtctctttattattttaaataacatccatcatttatagagatcttgcagcaaatttagacacaaaatataattagtttattattaagattaaaaaatatattaatggggtgaaatttagtggcaaaaaaaacaacaccgatgatggaacaatatcaaaaggtaaaagatcaatatccagatgcctttttattttaccgacttggtgatttttatgagctatttaatgacgatgcggttaaaggagcgcaacttcttgagctaaccttaacaacgagaaaccatagtgcaaaaaatccaattccaatgtgtggagtgccccatcgcgcagttaacaactatattgatattttaattgataagggttataaagtagcaatctgtgaacagatggaagaccctaaaaaggcgaagggaatggttaaacgagccgttacccgtttaattacacctggaacgcaaatggatttaaatggtgaacaggcacgtgataacaattatcttgcagcgattagtggacaaaatggggtatttagtattgcctataccgacttatcaactggggagcttaaaacgacaagcttaaataatgcaaatgacgcggttaatgaattggttaatctccaaagcaaggaagtagttgtggacggtgagttgccagctgaaataacaactcagtttaagcaacgaaatattcttcaatcacatcagccaacggtccttaaaaatgctgagatcagctatcttactcaagaccttgatgatcaagcccaacagcacgttgttgcgttacttgtgtcatacttattaacgacccaaaagcgctctttggcccacctgcagaaagcaattgcatatcaaccaagttcttttatgaagatcgatcactattcaaaaacaaatctcgaattaatgcgcaatatgcgaagtgggaagcgtcaggggaccttggcatggcttttggatgagacaaaaacagcaatgggcagtcgtcttcttaaacggtggattgaccggccgttgattaatcaaaatgcaatcagtgaacgacaagataaagtccaagagttattagaccactattttgagagaagtaatttgcaacaagagttaattaaggtatacgaccttgaacgcttagcaggacggattgcctatggaagtgttaatgggcgtgatcttattcaacttaagacttccttaaagcaagttcctaaaataaaatacgttttagaaacccttgattcacctgtctttgaagaattgcaaaaacaattggatcccttggacgatgtggcagatttaatcgatcaatcaattgttgaagaaccgccaattgctgttactgaaggtggcgtgattaaggatggctataatgaccaattagaccaataccgtgatgcgatgaataatggaaaacagtggattgcggacctgcaagaacatgaacggaaattaacgggcataaataacctcaaaattggttataatcatgtatttggctattatattgaggttacaaaagttaatcttaataagcttcctaaagatcgctatgagcgtaaacaaacattagttaatgctgaacgtttttctactccagaattaaaagaaaaagaggcattgataatgggagcgcaagaaaagtcaacagccttggaatatgatatttttgttaaaatccgtgaacaagtcaagggacaaattacacgcctgcaaaaattagcacaacaacttgcggaattagatgtactccaaagctttgcggttgttagtgaagactaccactttgtccgtcctaaaatgaatactggtcacgtattaaaaattaaagatggtcgtcacccagttgtggaaaagtttatgggacaccaggaatatgtgcctaataatgttttgatgggagaagataccgatattctcctgattactgggccaaacatgtcagggaagagtacctatatgcgtcagctagcattgattgcggtaatggcacaaattggttgctttgtccctgctaaatccgctgaattgccaatttttgatcaagtctttacgcgcattggggcagctgacgacttaatctctggtgaaagtaccttcatggttgaaatgatggaagccaataatgctttgacccatgccacggatcgtagtttgattctctttgatgaaattggccggggaaccgccacttatgatgggatggcattggcgcaagcgattattgagtacgttcatcagcatgttcgtgctaagacgctattttcaactcactatcatgaactgacagctcttgagaatagcttgacgcggcttaaaaatgtccacgtaggagcaacggaaaaagatggggagttagtattcttgcataaggtaagtgcaggtcctgcagataagtcttacggaatccacgtggctaaactagcgggaatgccatccttattgttaaaacgtgcagatactattttgcaaaaattagagcaaaaggatgtaaaactaccgaatgcgcctaaaccggcaacagataattaccatacagaaccaatatcagcaaagataaatgaagcggcaccggtaaagaaagagtctgcaccagttgttgaagataatggtcaacttgaattatttgctactcaacctgagaaaaaagaatcgagtgttgatcggcggattttacatcaattaaaagaacttaatttaatggggatgacacccatggatgtaatgaatcaaatttataagtggcagcagaaattgaaataaggtgatatttaatgggaaagattcatgaattagataatattttagccaatcaaattgctgccggtgaagtaattgaacgtccagcatcaattgtaaaagaattagttgaaaattcattggatgcccatagtcaccgtgtagatattattgttgaaaattcaggtttagacagtgtgcgcgtgattgatgatggtgacggaatcgctgctgaagatattagactagcatttcaccgtcatgcaaccagtaagattaattctcgccatgacctctttaaggtgcagacgatgggctttcgtggtgaagcgttacctagtattgcttcagtcgctgatgtaacgcttacgactgcgcaagctggtcaagaagaaggaacaatgattcatttgcgaggaggaaaagaattagtagtgaagccggctggtgcgcgtcaaggaaccgatattaaggtaaccgacttattctttaatactcctgcgcgattaaagtacttaaaatcacctcaaacggagctaaccagaattacggacatcattaaccgacttgcccttgcaaatccagcggttgcttttagctttacccataatgggcgggaattatttcggtcggcaggtaataataatttacaacaagtagttgccgcaatttatggcgttcaagcaggacgtaagatgcttgagataagtggtgcagatgatgattttaaggttagtggttttgtttccttaccagaattaacacgtgcatcacgtcaatatataacaatcacaatcaaccatcggtatattcgtaattttgaattaacaaaggcaattactcagggatatgaatcaaaactaatggttggtcgttatccgatcgcggtaattaacattgatctggaccctgttttagttgatgtgaatgtccatccagctaaacgcgaggttcgtttgagcaaagaacagcaattaataaaattgattgctgaaacgattcggcagcgaatagcagttgagaacttgattccggatgtcgatgctgaccaatttattcctaatgatgatgaggtagcggaccttgatcgccggttaaaggaagcatcacctgtttatcacgccgcaccgatttcggcagtgccggcaacagaaaaggcagcaactgagatttcaactccagcagctgataatccagcacatgctgacgcgcttgatagtgagattccagcaccgatcgttatccaccatcttgaagatttaaatacgctcgcaatgcaaaaatttgatgagcgttatcaaaatgaaggtgaagttacgccattttctgctccagttcccactatgactaagaagccagtaaaacctgcaaatattgaattggatgttcatgataaacaagatcagcagcaaaatcggtttcctgatcttcaatatattggtcaacttcagggaacctttttattagcacaagcaggagatggtctttacattgttgaccaacatgctgctcaggagcgaattaattatgagtattaccgccaaaaaattggggaagtgagcgctgatcagcaaaatttcttggttccgcttgttcttaattattcgactgtcgacgcaatgacaattaatcagcatctcgatacgcttgcagcggtcggattagaattagagtcatttggtcaaaatagttttattttgcgctcccatccaacctggtttaaagaggggcaagaagaagacacggccaaagaaatgattgattggttaattaagaatggaaagctaaccgtcaaagaatttcgaatgaagacagcgattatgatgagctgcaagcgggctataaaggctaaccaccaccttgacgaacgggaagctaaagccttgctgaaacggttgccgcaatgtgagaatccttttaattgtccacatgggcgtccggtaactgttcattttaatgatcaggatttagaaaaaatgtttaaacgaattcaggattcacacaccccatatgcagacgattttgatgatcatgaattttaaggaggaactaccttgtacgaatacttaacaggccttgtaactgttgttgcaccacaatatatcgttgttgatgttaatggggttggctataaattattagttgctaatccctatcgttatcaagaggatcggactaagaaggtccaagtatatgtttatcaagcagttcgtgaagataatatttccttgtttggcttcacagatcaaaatgaaaaaaaactatttatgcaattaatcaatgtttctggaattgggccaaagagtgctttagcaattttagcgaaccctgatcatcagggacttgttgatgcaattactaataataatgttaactatttaactaagttcccaggaatcgggaaaaagacagcttcgcaaattgtgttagacttacgtgataagctcactaatgaaagcagcagctcattatttgcaacaactcagcttaccgttgatgcaacagtaaatcgtgagttgaaagatgctttggaagcattggctgcattaggatacaaggaacgggacattaaaaaggttcaaaagacattaatgaaagaagaacaaatggcaactgatgaatacttaagacaagcattaaggttgcttaactaggaggtgcaagacttgtggaaaatgatcatggtattttatcagatcacccatcaggagaagaagaaaaccaagtggagataactcttcgaccacagaaactaagagaatatattggtcaacctaaaatcaagcacgaactagaagtatatattaaggcggcccaatcccgagaagaagcccttgaccatgtattgttatatggtcctccaggattaggaaagacaactttagcgatggtaatagctaatgagatgggcgttaatatcaaaacgactagtggaccagcgatcgaaaagccaggagatttggttgctttattgaatgagttgaaaccgggggatgtcctttttgttgatgaaattcaccggttacccaaagttgtggaagaaatgctttattcagcgatggaagattactatattgatattgttattggtgagggaccgactgcgcaccccgttcattttccccttcctccatttacattaattggggcaacgacacgagccggaatgttatcggcaccattacgtgatcgtttcggaattgttgaacacatgaactactatactcaagatgaactgacaaaaattatttttcgttctgccaagattttccatactagtattcaaaatgaaggggcccatgaactatctcttcgttcacgtggtacgccgcgaatcgcaaaccgccttttaaaacgggtacgtgattttgcccaggtagcagggaaacaaagcattgattcagcaattgttaagcaagcattatcgctgctccaagttgatgatcggggcttagatgagattgatcggaaaatgttgttaacgatgatcaatttctaccatggaggtccagtgggattaaaaacaattgcagcaaatattggtgaagaaactaatacgattgaagaaatgtatgaaccatatttgttacagatcggctttattagtcgtactcctcgcggccggttagtgacaccgacagcatatgaacatttaggaattgaatatccaactgatagaaattgattgaggaaaattatgagtaagttagaatttacaattaatcaaagcgatggccaagcacgaaccggaattttgcagattaatggacgacaaattgaaacaccggctttggttgccagtggagatgaactagcaaaattatcacccaaccagcttaatcaggctggtgtaagtgcagttaagacaagtggattaaagcgttggctaaaatatgattcgatgactgaaaaattaggagacctccaccaactttttcagtgggatggccttttatttgtggatttagaaactgaggaggcctatcacttagcaaagccacgcgggaaaaaacatgatggcgttcgttttcatgatccgataacgggacaattaaaattctggcaaccagaaactgctcttcaagttcaagaagcgctcggggctgatatttttcaaagctttgaccaagcaacagattattatgcgccagttgatgatttaaaagtaggggtaaaacaaactaataactggttatctgttgttaagccccaaaaaggccaagcccttggttcaattgttggtggcggcttaaaagatttgcggacagccagtattaaggcggtcgatgaggctgggttaagcggctatcggttgagtgggatccctagcagcttagatgatcaagagtttagtcgaatcattaatgaaattacgcctaaactaggagaggagaaactgcgctacctccctgctgcactttcttttgaccagctgatagaggcaattttagcaggagttgatttaattgatagcaatctagcagctaaaaaagcggctaatgggattgcattagttaatcaaggagtgacagttcttcatcttgatcgtcaacattttagcttcgattcacaagtgcttgatcgtcaatgtgcgtgtgcaacttgtcgcgcgggctattcaaaagcactactccatagtttaattaccaatcaaagtttttacggtgaacaacttttgctgcagcataatctgtttaccctcaataaattaatgagtagtctccgacaagcaattaaaaatcatcaaacaaaaaatttgttcaagaattattgcagaatcaatagagcatatagctttttatggtaaagtttgttaaagttaatattagttaactttttgaagggatggataaactgtgaatagtttgagtagttttgttcttggtgctgcttcatctaataatgcaagtggttactcaagaattattttaatcatcttaatggtagcattaatgtacttctttatgattcgcccacaacaaaagcaacgtaaagaacatcaagagatgatgaatgaattacacccaggtgatgaagttgttacgattggccggatgcatggtaagattgattcaatcaataaggctgaccggacagttactttagattgtgaagggatctaccttacttttgatatggtggcaattgcccgtgttattaaacgagcagatgcaccagctagtgaagttccccaagataataaagctgttgctagttctgccgctgacagttctgcagatgcttcagcagatagtgctgctagtgaacctacatctgcagcgagtgctagcgatgaacaaaaaggcagcgaagaaaagtaatttaatttagatgaaaatagtcgtaaacaggcgaatattttcatcttttttatttggttgttaatcgcgtttattgctatactaaaagatagtgttaaattttattcgggtaaggagaatagcataatggcagatccattaacagcaatttttgaacaaatcaaaaaatacaataaaataattattcatcggcatcaacgccctgatccagatgcaattggctcacaagttggccttgcggaaattttgcgggcttcattcccatataagcaaatttatgttgtagggaagcatattccagggtttgattggatcggtgagatggatacgattgacaatcagacattcgatgatgcattagtaattgttacggatacagcaaatgcgccacgaattgatgatcggcgctttgataatggggacgaacttattaagattgatcaccaccctaacgatgaaccctttggcgatattatgtgggttgaaccagatgcttctagctgttctgaaatgatttatagtttttatcaacgatttgcaaaagaattaactcttccccagaaggctgcccatgccttatatgcaggaattattggcgatacaggtcgtttcctttatccagcaacaactccacgaacgatgctagttgcaggttcgttaatggcagccggcgcaaatgccgcggaaattagccagcacgaaaatgaaattaccttaccagtggcccggttatcagcatacgtttatgaaaatttgcagatattagataatggagccgcatatgttatcttaaccaatgaaattttagaacaattcggattgactgaagccgggacatccgcaattgtttctttaccaggtcgaattcatgatgttattgcctgggcgatctttgtagaacaagaagatggccattatcgcattcgtctccgttcaaagggaccaacaattaatgaattagctaagcagcacgatgggggtggacatccacttgctagtggcgctaaggctaaagatgaagcagaaattaaacaagtgattgatgaattggaccaattaacacaaagttatgcaaaccaaaaatgaaagggaaatagctatgagtgataaaaaatttgctgattttcagttacaaccttatctgttaacagcaattcaaaaaattaattttcgtcaaccaacaccggtccaacaacaagtaataccagtgattatggctggacgaagtgttgtggggcaatcagcaactggtagtggaaaaacacatgccttcctcttgccgattttttcaaagattaatccagaagatcaaaccgttcaagcagtaatcacaactcctagtcgggaattagcataccaaatttataatgcggcaaagcaacttaataagtatgctcctcatcctcttaccattcacaattatgtcggtggtacagacaagcagcatcaagttgaccaattaagtcgaaaacagcctcaattggtcattggaactccgggaagagtattagacttaatcaagagtcaggcattggatattcacacagcaaaaatgtttgtggtggatgaagcggacatgaccctagatatgggattcttacatgaagttgaccaaattgccagtcattttcctgatgaccttcaaatgatggttttctcagcaacgattccgcagaaactgcgcccattcttaaaaaagtatatggaaaatccagtaattgaagagattcctactgaagcagtaattaatccagatgttgataattggttaatgtcaactaaggggcaggaccgtaaccagctaatctatcgtttgctgactcttggtgaaccatatcttgcattggtatttgctaatacaaaagaacgagcagttgaattaacccagtatttagaaaatcaagggctcaaagtagcgatgattcatgggggactggaagcccgtcgtcgtaaacggacaatgcggcaaattcgtgatcttgaatatcaatatgttgtagcaactgatctagcagctcgtggaattgatattgatggagtatcactagtaatcaatgacgacttgccaactgatcttgaatattttgttcatcgggttggtcgtacagggcgaaatgggatgaaaggaacagccattaccttatatgaaccagcagaagatgatttaattgctaagcttgaggagcgcggagttaaatttgtaccaaaagaattaaagaatggtcaactagtaactacccatgaccgtaatcgtcggaagcattataagcggcggcaaaatgaacttgatccgtcaatgaagggttacgtaaaaaagactaagaagaaggttaaacctggttataagaaacgaattaaaaaggcgattaaagaagacgaacagcaaaaacgaaagctagaattacggcataaaattcggaaagctaagcgtgcacgacaaaaacaacatcgccgtgaacgaaatgcccgttgattttaaagtaattgttcgctataatatgacacgtttgggacatgctataactaatggaaaatttcagagacagttggtaaggtgtgacaactgatttcctagccttagtgctccccattcggataatttgatatttaaccttgggcaaccaagaagtaaagaggtaaacgaattccatcgttgcaagcagagtggtaccgcgtcaatctggcgtctctgattcgcaatggtggttttttgttttagaaggggcgatttgatgaaagagttaaagaagctaaatagtgctcaagtacggcggatgtacttgaagttttttgaagagcatggccaccaagttatgccgagtgcatcattagttccagtaaatgatccaacattactatggattaactctggagttgccacaatgaagaaatactttgatgggaaagttgttcctgataatccacggatgacaagctcacaaaagagtattcgaacgaatgatattgaaaacgttggtaagactgcccggcaccataccatgtttgaaatgttaggtaacttctctgttggtgattactttaaaaatgaagtaattccatgggcttgggaattactaacaagtgatgaatggtttggttttgatcccgaacggctatacattacttattatcctaaagaccatgacgcttacaatcgctggcgtgaagtaggcgttgctgaagatcacttaattgctgatgaggataacttctgggatattggtcaaggtccatctggtccagatacggaaattttttatgatcgtggtcaagaatttaataatttagccgatgatgatccagaaaactatcctggcggtgaaaatgaacgctaccttgaaatttggaacattgtctttagtcaatttaaccatacgcctgaagatacttatgaaccacttcctcataaaaatattgatacggggatggggcttgaacgggttgtttcgatctttgaaaatgcccctactaactttgaaaccgacttatttatgccattaatcaagcaagctgaagagtttagtggtactaagaagtatggtcaaaataaagaagacgatattcaatttaagattatcgctgatcatattcggacaattacctttgcgatcggggatggcgccttgccttcaaatgttggtcgtggatacgttattcggcggttgcttcggcgagcagttgttgctggaaagaagttgggaatcgatgaaccatttttagcaaagatggttccaacagtcggcaaaatcatggaagattactatcctgatgttcttaaaaatgctgactatattgcttcggttattgaatcagaagaagaccgctttagtgcaaccttaaatggcggattaaacttgttgaataacgtgattgctgaagctaaggaaagtaagaccaacgaaattgatggacgaacagcctttaagctttatgacacttatggcttcccaattgaattaaccaaggaatatgctgaagatgaaggactaacagttgatgaaaagggcttccaagcagcaatgacggagcagcaaaatcgtgctcgtaatgcccgtgatatggataacgggatgggtgttcaaactgatttatggacttcattcaaagaagatagcaaatatgttggctacactgatttgaccgttgataatgcaaaagttatcggcttagcacatgatggtcaacaagcggatgaagcacgaccaggtgataagaacattgaactaatttttgatgtaacgccattctatgcagaaatgggaggtcaagtcgctgatactggtgacattattgataactatggtaaaaaagttggccgtgtggttgatgtccaacacgcaccaaaccagcaaaatcttcatcgagtagaattaactgcccctattaaaaagggtgcccgttacaaactagttgttgaccgtattcgtcaccttaagattgaaaagaaccatacagcaacgcacttgttagaccaagcattacggaacgttcttggtggtcatactcaacaagccggatcattagttgaagaacattacctacgttttgactttaaccactttggtcaagtaactgctgaggacctcaagaaggttgagaacatggttaatgagcaaatctggaaggaaatcccagtcaagacagttgaaactgatattgattctgctaaggaaatgggtgctatcgccttattctcagataagtatggtgataaggttcgggttgttaagattggtgactttaacactgagttctgtggtggtgatcacgttaaaaatactaatgagcttggtctcttcaaaattgtttctgaaggaggagttggtgctggagtacggcggatcgaagcagtaacttctagtgatgcctttaagttcctccaagatcgtgatgacctcttaacaaagagcgctgctagtttgaaggttgctcagattaaggaagttcctcaccaagtagaaacattacaaaatgaacttaaagaagctcaaaagcaaaatgagtctcttcaagctaagattgctgctcaacaagctaataatgtttttgaaaacgttcaagcaactaagaatggaagtttaattgctgccgaagttcaagttgctggaatgggtcaattacggcaacttgctgatgcttggcgctcaaaggctctttctgatgttctggttcttgctacagccagtgatggtaaagcaaacttattagtggctgttagtgatgataaaactaaggaaggcttaaaagccggtgaccttattaaggcgattgcaccagccattaatggtggcggtggcggtcggtcaaacctcgcccaagctggtggaaagaatccagctggaattaaggaagccttaagtcaagctaaaggttacctcgataagtaaatcaaaaatgagaaggaaataaccatctcatagtctaagagattgaaagaaaccaatttttgagttctttcaatctctttttgtaagaacttcttaaagtaataaaaaaatactatcaagaaatcctattatcagctataattataaaactaatattactgtttacttacaattgacaaatgtaaattgtgattttaataagaatatagtaaaattgatggttgaaaggaatatctggaggtgacgattgatggctacaaatgataaaacgatgttctttgattttggtcaagaacgtcaagaagatattaagcaaacattaaagacggtttatgaatcattagaagaaaagggatataacccgattaaccaaattgttggttatcttttatctggtgatcctgcttatattccgcgtttgaatgatgcacgtaacttgattcgtcaacatgaacgtgacgaaattattgaagagcttgttcggtcatacctaaagaataacggtgaaactaaatgagattaatgggattagacgttggctctaaaacggttggcatttccgtaagcgatcctctcggttggacggcccaagcagttgagattattccaattgatgaagaaaacgaaatttttgggattgatcgtgttgccgagctagtgaaaaaagaacaggtagctgggtttgtaattggccttcctaaaaatatgaataatacagaaggccctcgtgttgaagcatctcagcactatggcaagctattacaacaacgttttccagatattcctattgactttcaagatgaacgtttaacgacggttgaggcacaccgaatgctagttgaagaagcggacatttcacgtgctaagcagaaaaaagttatcgatgaagttgcagcaacattcattttacaaagctatttggatcgccatggccgccttgtgaataagctaaaatgaggtattaaaatgagtaaacaagaaaataacgaagacatgattacgttaattgatgaaaatggtaatgaacaattatttaaggaattgtttacgtttgattctgatgattatggcaaatcctatatctttatctatccagcggaacaagaaaatgacgattccgttgacattcaagcttacattatagctgataatgaagataacgatggacaggaccttgtcccaattgaagatgataaggaatgggacatggttgaagaagtattaaatactttccttgataatgatggcaacttcaaggcctaattaaaattactggataaataaaatattaacaaaagggagctgtagacacatttgtcacagtcctttttctttacaagcagaatgaaaggatcattaggatgattttaacaacctttattattttgattttaatggggtgctttattaatggtcatcgccgcggattattgacaatgacgttaatgctggggacatatatagtagcttggattgttgctcgccagggagcccaattgattggtggctggttaaaatcgttattaccaagtattggaaccccggcaactttttccgagagcttgcttgcaaatgtaaatagtaatcttttcttttataatgggattgcatttatgataatttttacaattgtttcaattctttgtcactggggaattcgtcagttaaactggataaagaggattccagtggtgggaacagttgataagatcgcaggtgggttaatctcatttttaattggctatttgattatttacgttgttttactaattatgcaattatttccagcaggttggtggcaaatgcaaatagcaaactcggaactagcgcgttttatgattaatcaaacaccaggaatagcgcatttagtaattgatacgctagtacagggaggataaaatgaacaacaaaattttagaaacattagaatttgatcgaataaaaggacaactggcacaataccttgtttctgccgctggtcatcgcgaattgacgcagcttgttccacagactgattatgaggcagtcaaagaacttttgacagaaactactgatggggccgatattttaaggttagaagatgggattcctattccgcaattagctgatatcaaaccgcaattgaaacgtttgaaaattaaggcaaatctgaacggcacggaattagctcaaattactaaagtgctgcaaactagtatgagtgtaaaaaacttttttgatcagatgcgggagaaaaaaattaaactacgggttttaactacccaagttgaccgcctagttacaattccttcaattacccagcggctagttcgttcgattgatcctgatggacggataaatgatgaggcatcagctaaactccatggtatccggcaattaattacccaaacggaaacagagattcaccaacaaatggaaaggtatactcgtgggaaaaatgcgaaatacttaagtgaccctattgtcacaatgcggaatgaccgctatgtgattccagtaatcgcccgctatcgaaataaatttggtggggttgttcatgaccaaagtgctagtggacaaacattatatattgaacctgcagccgttgtggagaccaataatcggttacgacaagcgcaaatagaggaacggcaagaaatgcaacgcgtattaattgagttatcacaaatgattgctccttatcgacatgatattggtcagaatgaagcaattcttggacaccttgactttattaatgcaaaggcacgctgggcacatgatactaaggcaacgctaccgctcttaaacaaagaaaatcatgtttcattacggaaagcgcgtcatcccctgatcgatccccaacgagtagtgacaaatgacattaagattggggaagattaccaagcgattattattactggacccaacactggtggtaaaaccattacgcttaaaactttaggaattattcaattgatgggacaatctggcctatttattcccgcagaagaaggcagtacaattgggatctttgataatgtatttgcggatatcggtgatgaacaatcattggaacaaaatctgagtactttctctggtcatatggatggagtaaaagccattcttgaacaaattacaagtcgtagcttagtccttctagatgagcttggtgctgggactgatcccaaagaaggggctgctttagcaatggcaattcttgataatattggcagtaaaggaaccatggttgtaattactacccactatcctgaacttaaagtttatggttatgatcgtgctaagacgattaatgctagtatggaatttgaccaagaaactcttaagccgacgtataaattactactagggattcctgggcggtcaaatggattagagattgctcagcgattaggaattagtccccaggttattgatgaagcacggacatttgttagtgataatagtcaagaccttaacaatatgattggtgatttagtagagcaacggaaaaaagcacgtgaagaaagtgaaaagctagcaaaactagtagccaaaaatgaaaaagttcagcgtgaccttgataagaaactcacccgctttaatgaacagcgcgataagctatacgaacaagcacgttcaaaggccaaccatcaagtttcgatggctaagaaaaaggctgaccgaattattcatcatttgcgccagttagaagttcagcagggcggaaatgtaaaagaaaatgaattaattgatgcacaagggcaattaaacgctcttcatcatgataatccacggttgcaacacaactctgtattacaacgggctaagcaaaaacatgatttgcataaaggtgatgcagtcttggtgaaatcttatggtcaatatggagaacttttatctaagcgagggaaccacaagtgggaagttcagattggaattcttaaaatggaaattgatgagaataatcttgaaaaagtagctaagaaagatcttccacgagaaaaagatgcaaagcggcgaccacgagctgctgtgagaacgacacaaacacgaaagacctcggctcgtcttgatttgcgcggtcatcgctatgaacaagcaatgagtgagctaagtaactttattgatcatgcattgttgaataatctttcaacggtaacaattattcacggaaaagggaccggtgctcttcgtaagggaacacaacaatatttgcaaagcaatccacgagttaaatcattctcctatgcttcccctaatgctggtggggatggggcaacaattgttaatttataattacttactataaaaagtaagcaaactaaatgacatttaagaagtgatttgttagaatagcgttaagaaaaacaaaggaggaattgaatatggctgtaaacgtaactacagatcaaacctttgaacaagatactgccactggtgtcgatttaattgatttttgggcaacttggtgtggtccctgtcggatgcaatcaccagtagttgatgcattatctgataagatgcccgatattaaattttttaagatggatgttgaccaaaatccagaaactgcacaaaaattccggattatgagtatccctacattaatggttaagaaagatggtaaggtagtagaccaaatcattggttaccatagtgaagatcaattaaagcaaattttacaacaatatgttgattagaaaaaagctggagaaaaactttttgttttcttccagctttttcgtattttaaacttattttttatctttttttcgtcgctttagtagggaatgacgagtttcttttttgagggtgtcttctttttcgtcagggcgatcaacagtaatgaatgttaccatctcagatcgttcattatcagctgaactttgtggatcgttttgaatcaaaatatcaacataatcacggtgccagtcaaagatctttgcctctgcaaccgttccaagttgaaactctacttcttgagcaagaaaaccacactctaaaccaaaggaggtttcctcttcgtctctttgaatccgttcctttacaattacccctgataacctccaaacttgagaagtattgctttttttacgtaaagctaaacggccaaagccaagttgattagtgagatatactagatcctcggctgtagcaacaggatatactcgagcgagatctttaccaatccaatatagcatttcatcggtctctttacccaggatagctggtaaaatcacgtcgcgcattgttccagctcctagtccttgatgaccggctattaattgattatataatttctgactcatatccactcgctcctttttaacaatcattattattatacttaaaattcaagatcttaatagggttaaacctgaaaaacttgcaaaatcttatggagaaacggataatatagtttcaaggttttaaacgttttaataaattaacgaggtgaagagaatggataaacgaccaatcggggttatggattcagggttaggcggcctatctgtaattcgtgtacttcgtgaacaactgccccaagaatctgtaatttttgtgggtgaccaagggcattttccatatggaactaaaacaaaagaacagattcagcaattagcattacgcattggaaaattcttgttagaacaagacgtaaaaatgatgataattgcatgcaataccgcgactgcagcagctcttcgacttcttcaaaacgaattaccaattccagtaattggggtaattgaaccaggagccatggctgctacccaacatcattataaaaaaattggggtaattggcactgaatccactattaaaaatggcgcttatgctaaaacattagctaaacttaatcctgatctaagtgttatcagttctcccgcacagccacttgtctcaattgttgagcatgggcaaacaggaacaagtgaggcacaaaaagctgttgacactgaattagaagtatttgataaccaatcgattgaagctttgatccttgggtgtactcatttcccgtttttacaaaaagaaattcataataaattaggatctaatgttcagttaattgatcctgcatttgagacaatcagacaggcaaaggaattgttaactggcaaaaatcagttgagtgataatttagcgtcaagtatcaacctttattcaacgggagatgctaaagacttagttgctggtgcacaacaatggttaccaaacggatacagtaagtgtgcacatattgaattaaacgaggaaggttaaaatgaaaacaatcgtaatcgcaacaaagaatgccgggaaagtgcgtgaataccaagatatgcttgctcccctaggaattgaagtaaaaacattagccgattttgcaccaatagcaattaatgaaaatggtaaaacatttgaagaaaatgcaacaattaaagctactacagctgctaatcaactccaactaccagttatggcagatgattcgggcttaatggttgatgctcttggaggtgctccaggtgtacactcagcaagatatgctggtgatcatgatgatgctgctaataatgctaaactcttattggcgttaaaagaggtaccggatgaaaaaaggactgctcactttcatactaccatcgtcggaattaagcctgatggaaccaaattagttgccaatggtcgggttgatggccatattcttcatcaactcacaggagaaaacggttttggttatgatccgcttttttatgttgatgaattaggcaaatcaatggcccaattaacagcagaccaaaagaatcaaattagtcatcggggacgcgcattacgatcatttatgaagcaatttaatgattggtggtaataaaaatgaaaatactagttgtaagtgataaccatcgagaagaaaaaattttgacagagattgttcaaaaaatgggggatcaagttgacctaatgattcactgtggggattcagaattagctcctgatcaggaaccgatgagcaattttaaggcagtgaaggggaataatgattatggtttgtcgtaccctaatgagttggtaattaatgctgggcaagagcagctctatctaactcatggtcatttacagcgggtcaatttttctctgacccctctgatacttaccggccaagaaaaaggtgcctccattgtgtgctatgggcatactcatcagttaggagccgtttacgatcatcaaatgctaataattaatcctgggagcatcagttttcctcgtggtgaatatgctaaactcgggggaacttttgcaattattgatgcgcagcctgagcggtttattgttgattattataaccgcgagatggaagctgttcctgaattacattgtgaattcagtcgtcagaaataaaggagtgtatttttgtgattgatcagcgtttgcagactttattgctgaaaaataagcagaagtttatgatccctgccagtttagttgcaacagtaaatcaaagcaacagtttagatcatgcatttttagtccttactaaggatcggtacgctaaaattattgtgattgataataaaaaccgttactgtggtcaagtttctttggcgatgattactgaccgattattggagacaaaacggatcaatgtggagcgcttaaatgaattaaaggtcagggatgtgatgcaaaccgatgcgccagttatccaagatccaactgatatcgaagaaaatttacacctcttaattgatcagtcatttttaccggtggtggacgatcataattacttttgcggaattgtgacgcgtcgtgaagtattaaaggcggtcaattatacaatgcatacttttgggaaataatgaaaagtagttatgatataagtcaagttactttcataaaaaataaatagcgcagtacaacataggcctccagcgtccggtaaaaccgaacgttggaggcctccttctttttatcattcatttttaattaactgattaatagtctgcaagacgccatcatgattattatcaattgttgtggtatgggcagcttgcatttgaataattggttgagcattttgcattgcgtaactttgactcgtcattgctaacatcccgaggtcattttcattgtcaccaaacgtaacaatttcatttgcctttaaattaaagtgagactgtaaaagagaaagagcgttttgtttagttgcagcagcattaccgattaagtcagtattaaagcctgaattttccatgattaaggatggtggtaagtaaccatctaaggttgttgcaactttttttagatcgatatggttagcaaaattaatcgatatcttggtaaaatcttcagttggccgttgagtgaaaatttgtcggatatcagggatacgctctacattttcataaaaaagtttcacaatattgaaatcatgagcactcatcccctgatcaacataagatttttcactagtagagattactaattgattaatatcttgtggaccatagaaacggtcaaggacatgaataacccgggctaaagattcttgattaataggaaaagatttaaataatttgcttcctaaatgaataactgaaccgttttgcgaaataaatcccatcttggcggtgtagtctttaaattctcgttgcaaacgtggaaagctggatccactagcagcgacaaagtagatattatggcgttcaagttggcgaaagacctttgcaaataaagaatgattgtaagtatggtcatctcgtaaaaaggttccgtccatatcagtagcgattaatttaatactcattaggtactccctcccaggcaattggaatattatttgttcgtaattctttaagatatgctgccaaaaagcgactagcaacagttgattgttttccgctgactgctgttatcgtcacacgaaaaacgagcgcaccgtctggggtaacgactggtccgacaataactggttttaattgtagtgcctttatttgtggaactagttttttattaacttgcgtaacaatttcttctaccttactaagaggggtcttcgaagtaatccgaatatcaacgttgctaaccatattatttcgtgaaaggttttgaacaatagtaatgttacggttaggaataaaattaagtgttccgtcagaactagtaacttgtgtagtacgaataccaagagcagttactgttcctttgatttgcccaatttggacagtgtcgccaacgtctaattgttgctcaaggaggatgaaaaatccagtcacgatatcactaacaaggctttgcgcaccaagccccaatgctaaactaaagattccggctccggcaatcagtgtccctactggaacgccaatttctgatagtatggcgtataataagaaaaaataacaagtataacgataaatatttaagacaagggcttttaccgttgccatccgattgctattttttagtacattgtatttttttgattcttgaaaaagatggacaatgataactcgtcctacccataaaagtattaaaaataagacaaacgtaacgataattaaaagaaatttacttaaaagctgttgtgaaatttcgtgccaggataaatctgtaaaagctttttttaattgttccgtttgttttgatgtaagtgaagtggcaccagtgatcataataacctcctaaaaaatactaataaatattttaacagggaagacaagcttctgtcgactacactagattatcgtttttatttgttttatgatattcttagcattgaataaatattttgaaaactaaaggagggattatcagatgacttttggccagttggcagggttaattgcggcaatcgcattcttaatcttagtcatttttgcatgtatcctgttgaatcaattgagtaagacaatgaaagaaacaaataaaagtattacaactttaacgcgggatgttcattatcttagccaagaaatggaggacgtgctaagtaacacgaatacattgttagacgatattaaccataaatcagaacaactagatccggcggttaaagcggttgcagatgtaagtcagagtgtttcggaagtgaatgcctcacttcaagaaatggtcgagaaagcccggttgcaccgcgagaagcgacaatttgaccggagtatttttaaatttgcaggaaagacacttgttttcgatgctttcaacaaatttagacagcatcggaagcaaaagaaaggaatgacaaataatgagtaaaaaattacttgctgggatattattaggtggagtcgcaacatatgctgcatggaagaaaatggcgccggctaaaaaagaggcattgaaagaaagcgttgatgaaaagattaataaggttgctgattatgtgactgactataccttagacgcattagacattgtcgatgaccttatgagtgattctaacttgaatgataaggtgagcggcgctgcgggtgctgttaataatgttaagggtaagataaaagatagcgccaataaagtagttaatcatatgactaatgatgactttgataagcaaactgctgatattcgtgaggaattagcgaagaataaagaaacagatgaagataataacgatattattatcgatgctactagtgatcaaaagccagcatctactgaagacgatgaaacagatcaagatgacgctaatgcagccgataaataagtaaataaaaaagctgagaggtttctcagcttttttattttaatgagggaaagttagtaattctttagttgtatgcgtaaatggttcgcaaccatcttctgtaatatgaacacagtcttcaatccggacgccggcaaaacctggaatataaatgccaggttcaatggagaagcacattccaggttcaaaaactagctgatttccttccatgattgatggaaattcgtgttcactgctacccattccgtgcccgaggcggtgaataaagtattcgccataaccagctacagtaatgatatcacgagcgatcttatctaattcttcagcggtcattcccggcttcgcagcattttgagcggccaattgagcctctaaacataccttgtagatgtctttttgtttgtcatttaactttccgacagccactgttcgggaagcatcgctaatatagccatcaacaattgttcctaagtcaaagaggacgagctgattattttggatcttattactggaggtagctccatgaggttcggcagcatgaggacctgcttgaactagcgtatcaaaactcattttattaatcccatgttgtttaagagcgtattctaaatcggcagcaacttcttgttctgttttaccaatttgaattgcttcgaatcctactttaaaagcgaaatcagcccatttccctgcttcatttaacttagtaatctcatcatcgcttttaatcattcgcatttttgctattaaaggagagagatcagtattaaaatgggcattggggaggacttcttctaaggcacgaagacggtcaacagttagtgattctccctcaattccccagttaattggtgaaccagcatgatttttgatatgttcagcaataagctcaaaaggtttttcgtgatctaaatacccatataccggatatttccaaccagtatcctttattgcttctacttcaagcgctggtgcaaacagaaatggctcactgtcggcaaaaaggactagtgctaatacccgttctactggatcgctgtagaaactagttaggtaattaatggtcattggatcactaatataagcagcatctaatcccttttcagtaagagcgctttgtaattgattaagttttgtcactgcattcacttcctaaaaaagattgcgaatattataacatattgttatgacccgaaagtaaaaaaataatgaagaacgtttgctaattaaaactaaatctgctatattaactaggttatgaaaaaatatgaaaacagattataccaataaagaaagggctatcttatggaaaaacaatcagtaacaatttatacggttgcccgagaagctcgtgtctcaatggccactgtttcacgagtagtaaatggcaatccaaatgtaaaaccagaaactagacaaaaagttttagatgtaattaagcagcttaattatcgtcctaatgcagttgcacggggattagcttctaaaaagacaacgactgttggggtagttattcctaatataactgatccatactttgcggaattagcattggggattgatgatgttgcttcaatgtataagtacaatatcattttaactaattctgattctgatgatgaaaagatcctgaaagtggtgcggagcttgcttgctaaacaggttgatggacttatctttatgggtcatgatgtttctgatgatctgcgaaatgaatttgaaagcacaaatacaccagttgtagtagctggttctgttgttaatgatgatgctttaccaagcgttcggattaactaccaagcagccgccaaggaagcgacagaatttctgctaaaacatggtgatcaacaagttgcctatattactggtccattacgatactcaattaatggcgaagaccggctcaatggatataaagaagcattggcaaataataatgtgccatttaatgaattattagtaattgaaacggacgggtcttatcaggctggatatgcaaaggcacaagaagttatcgaaaagggattaaaggctgcttatgtaacagatgatagtttagctgctggtctcttaaacgggcttacggatgctgatattagcgttccagatgattttgaactaatttcttctaatgacaccaattatacaaaggttgtccggccaacaatcacttcgatcactcaacctctttatgatcttggtgccatttcaatgcggttgttgacaaaattaatggatggcgatgacagcaatgatgatgaaaaaaatgttattttagatcatggctttgttgaacgccaatcaactcgtaagtaggttgtgatttgttgtgacaacccgaagtgaattacgagcacaacgacaagaaaaagttgagaagccaatagaagaaacaccgaaaaagcatcattttctatactgcttatggggtgtaatctgtgtgactttactcgggctaacattactaattaattcgacacttttaaatgttaactttgtaaaagaagaagttacaaattcgtcgcttgaatcagttatgttaaaccaggttaacagtagtctaattcagtacgggatttcaacttctatcttaaagaaaagcgatactgataagctaattaaccaggcaattgatcaggtatatgcaggtgaaaaaattaatcttgacctatcacctatagttaataatgtgggcgcatctgttaattcccaattagctcaatatggtttgtctacttccatgttaccagcaggcagttcttcagcaattgctggtaacattaattcgatggttaacagtcagttaaatgctcccgaagttgcacagttaattaatgggattaaaattgctaaaacggttgttaatattattttagtgatttcaattatcagcctcgttatattgattcttaaggggttatggcagcatcacttaattggtagttttaggtggatttgtctgtggggaactattttatacacaggaatcgttatgactattcatgcgattgcccttcaaatgggtgcaggccaaccagacataagtccctttatttcccaggttgctaatgattttcagcagactggatttcacggttcaatgatgatgattgtcattagtattgtgttatttattctgcactttgtaaaacgaaaatggcaacctcgccaataaccttgaattaacgatgaatatttgctaaaatttatctgtttgtattacactaataaagaaaagaggagtcagtaatgtcaggacattcaaaatggcataacattcagggacgtaagaacgcccaagatgctaagcgtggtaagattttccaaaagatttcacgtgacttataccaagcagctaaagcaggtgatcctgatccagcgaacaacgctcaattacggcttgtaatcgataaggcacacgcggccaacatgcctaagaaaaatattgaccgtgctattgctaaagcttcaggtattggtggagctaagttcgaagaagttacttatgaaggttatggaccaggtggggtagcagtaatggtttctgctcttactgataacaagaaccggactgcatctgctgttcgttcagcatttagtcactctggcggttcattaggtgctagtggatcagtttcatacatgttcgaccgtaagggattaatcgaaattctccgtgatggtcttgataagagcgaagatgatatgttaatggatgctttagatgctggagctgaagatatgaaggcaactgaagaaaagttccaaatcttcacagatccaagtagcatgacagatgttcgtgatgctcttcaagaacaaggctacgaattagatactgctgaagttaccatgatccctcaaaaccggacagaggtacctgcagataaggcaaagcaataccgtcatttgattgatgaattaacagaaaacgatgatgttgctgatatttacgaaactggtattttaccagacgaagatgacgatgaagaataattcaatcattgttattaagaggttaaaaagcaaaacgctttttaacctcttttttagttttaaattttttagtgcatttttagaatttatccgtatttaaataatagggaggttaaaatatgccgagttttgaagaagaattagcaagaatgattcgcaagcaaccgagtgacctatatatcttacctcatgataggtattatcaattatccttagcgataagggggaccctattaccttttaaacaggttacgcgtgactatggtcaacgttttatctcatacttaaaatattgcgccaatatggcagttagtgagcatcgacgaccccagctaggcgcttttaaatttacttatgctcaccaaaagatcaatttacgcttatcaagtgttggtgattatcaagggagggaatcactagttattcgctttatatatcctcttaatgatattaggtttaattttttagttcctcatcagtgggaaagattacagaaataccgtcaacaacgaggtttaattctttttgccgggccaatgggggctggtaaaacaactaccatgtatcagcttgctcgacagctattgccgaaacaaattgtattaacaattgaagaccccgtagaaattgatcatccgggatttattcaattgcaagtaaatgaattagcggggatgaactatgaaagtttattaaaattgggattacggcatcgcccagatgtatttatcattggagaaattcgtgattcacagacagcagctatgtctgtccaggccgcattaagtggtcacttagttttgggaactatccatgctcgaaatgcttatggcgttgtttctcgccttcaacaattagggatagattcttattaccttcagcaagtattaacggcagtatcttatcagcgtttaattccgttggtgaatggagaacaagccatcttatgtgacctgttaaatcgacatcaatttagtggtttgcttagtggcaccaagaaaggaggaatatctgatgaatggtcaaaagctcttcagcaggctgtggaaaatggcgaaattacggagaatactgcacgtcaataccaacaaggttaaattcaatcatcagcaacaagcagattttttccttttattagcagatttattaagtgttggcttttctgtcaaagaagcacttggttttatcaaggctgtcaatccgaagctaggtccttggattgcttctatagataaacgaatgcaaaagggagcgagttttgcccagagcctgcagtcagaagtaaaagacgatttgttttatcaattactattagcagaaaagcatggtaatttaacaaaaacattgagtgaagtaggaaagatacttacagcacgagaacagcaacgaaaaaaattatttagtctcctgcaatatccgctaattcttttagggatgctaggggtggtgatttgtgggttaattttgtttgtttttccagaattgaaagtctggcaaggcgagaggcaaactttgccgctaattcacatgattacgttaggagcaacgtatctttttaccgttatctttattagcgctgtatttcaggggctaagatggcatcaaatgaataaggaacaacggctaattaagatctgtacaataccgatgatcggaaaatgctattgttattattttcaatattatttaactagtatattaggatcaatgttgcaacaaggattatcgttggctgaaatttgtgaaattacccagagctttgatagaaaatcaattctttatatttttggtaacaaaataatgactactattcaacatgatggagatatttcaaaagtggtggctacctactcttttcttcctaatgaattaattgtttttatgaataagggggcgaccagggaaaatatgggacgggacttaattgttttcgcgaatttaaaatttaaggcccttacaactgcaattgaacatttattgatttttgttcaaccagttatctttagcattattgcaatcataattgttattttatatcttagtatcttattgccaatctgtcattcattccaaggagtttattaatgaaaattttaaagaaaaaacaatcaggcttcaccttgctcgaaatgtcaatcgtcttatttattattagcctactagtattgattatgctgcccaatctctctcaacagcgaaagcatgctaatagtattcatggaaaagcgatgacatctgtaattcagacccaaattgatgcatatgaaaatgaaaatggaactgataatgtcagtttagaggaattgaataaagcaaattatctgactgatgcgcaggttcaacaggcccatcacgaaaaaattgtaattgttgatgggaaggcaattcagcgatgaattttcgtgaagaagggtttacgtttctcgaagcaattattgttttaggaataacggccctccttttactaattacgattccaaattttacaaaaacgcgtcaaaaactagctgaagaacaattttggcaatcattgcgtcaagattggcagtgggcgcaattaaagtgtgagagtaaacatcaatttgttgtaattcgccacgacaaaaataacgaaatgattacttttcgtataaatgatcaaacgagagagacaaaagaaatccttattccctcaacactgaatgttgagtggtttggtgaactttatcttacgccaaatggctatacgcgcccctgtacccagcgttttaaatcattaatcgatggtcactattactacatgaagattcaattaggatggggaggataccgaattgagaaacgctaaagtaaaagcatttatgatggcagatagtttaattagtttatttattgtagcgatggggataaatttattttttatttgcgaaaaacaattgtggttacaaaatagaaatcttcagctaaaaatggccgcaacgaggttaggaaaagaggctagtgatttatatgcggttaaaaagcaatcagttattttaagccgtggtgatttaaccgcaaaagcaacggtccaaagggtggttgtttataataataatcgatgcctttgtcgggttgaaagatgaagaagggggcctttactttaatagaagcgacttacgcgttaattatttcttcattagtgattatcaatataagtttagttactactagcatgagacaagtaggtaaaatgaacttagaatcaacgatcacttggcatttgtttttacgggaattagaatcagtcaatcatcgttttgaattaatggaggttcgtgataattggttattactgtacagtcagacaactgatcaaaagtatgaattaagagaaaaccatgctctatacctaacgtgtcagaataaaggtggttatatgccattgttagatagcattaagaatcatgaatactcgtttacgcaacttgattcccaacgcgtattgattaaggtgacaaggaaggatggagagaaagcaagtgcaattgttaagttttatccaccaaaataaaaaagagggttctattttatttgtaagtattgccgtcctacttataattagttcaattttattgtttcaatatcgatattatcaaaattatcaggaaatgggacgagatctttgttcaatttatattgataaaataaaagataatctaagaggtcaatgagagtgttatcttgaatttgctaggaataatagttaaactaataaggtaatgattgtattatttggaggcgactagcactgacacagaaaacaccacagcaattatttgagctttttgataaggccactgaaattttacaagcagcgttaaattgttcgtatttagatgcgctattagaaaacgcagaaaatattattgacaataatactgttcgtgttgatgaaggtgttcctgatgaaaaaactgtaaatgaattgcagaaaatataccaagaattaaatttacaaaatgtgaagccagaaattatccgacaaattatccagctgagttttttgaaagtaattcgaaaagatgcaattcaggctaatcatcaaatgactcctgatacaattggcttaatcatggctttcttaattgaaaaggttacaaaaatcaaggagattaagactgtttttgatccagccgttgggacagctaatttattaacgactgtgatgaatcagcttaaagtaaatggagataaagacatcgttggttacggaatagataatgacgaagatatgttgggagttgcgagtgtaaatacagaattacaacaccttaatgtaaagttgtaccatcaagatgctgtaactgctttagatatttctcaatgtgatttagctatttctgatttgccaattggttactatccgcttgatgaaaacgccaaaaactatcaaacacgggctaaagagggtcattcatatgttcaccatttgttgattgaacaatctatgaattatcttaagcccggtgcatttggggtattcttagtgcctagtagcttattccaaactaaagaatcacaatcatttgttaaatggattcagtctgttgcctatttacaaggacttatcaatttgccagcagaactttttgctaatccgaatgcgcaaaaatcaattttgttattgcagcgccaaggtggagatagcaaacaagcagttaaagttttgttgggtgagtttccttcatttaaggataaagcaaaatttgcttcattcatggatgatatcagtaaatgggtaacaacgaatttacgttaaaggagaaaagtcaatgtcaaaaacaattgcagttaacgctggtagttcaacacttaaattcaaattatttgatatgccaagtgaagaggtagtagctgaaggtacgattgaacgtattggtgaaaagatgggccatgctaagattaagtatggtaatggtcaaaagcatgaagaagataagccatttgttgatcatgctgccgcagttaattatttgttagataagttaattgaattaaagattgtggcaagctatgatgaaatcacagcagtaggtcaccgaattgttgccggtggagaattctttaaggattcaacaattattgatgatgatgttattagcaagattgatgaattgtcagaatatgctccactccatgagccggcagaattggttggtattaaagctttccgtaaagtattacctaatgcatttgcggttgctgtttttgatacatcattccatgttgatatgccagaaatgaatgcattgtacagtgtgccttatgattggtatgagaagtatggtgcgcgtaagtatggtgctcacggtaccagtcaccgttacgtatctgcacgtgctgcggaaatgttaggcaagccagttgaagaacttaaattaatcaccatgcatattggagcaggtgcatcaatcactgccgtaaagaatggtaagtcattcgatacgtcaatgggctttacgcctgttgctggaataacaatggcaactcggtcaggggatgttgatccatccttaattgcttttatgcagggtaaactaaacttatcctcagatgagatgattgatattttgaaccataagtctggtttgcttggtatttctggtatctccccagatatgcgtgatattcttgcagctgctgaaaagggtgacgaccgagcacaacttgcattagatatttatgttaaccgcattgtccgttacattggagcatatattgctgaaatgggtggcgcagatgccattgtcttcactgccggtgttggtgaaaacagtgttccagtacgaaagatgatcacagataagcttgactactttggcattaagattgatcaagaaaagaacgactgccatggtgttgaacgtgatctttctgctgatgatgcaaagattaagacattattaattccaactaacgaagaattaatgattgttcgtgatattgaacgtttaaagaaaaataactaagtactaaataattcgccaaaagctgactagttgacaagaaatgtttgtctctagtctctttttattttagaatttaagataactatattgcctttttaagaaagaagattctctatgaagttttgcacgtcagatactcatttttttcatgatagtctccttggtacaaataaatttgcaccaaggccattcaataatgtcaatgagatgaaccaaacgattattaataattggaacgataaggttggtgaaaatgatattgtttatcatttaggagacattgctctgtactttactaaacctcaacgaaatgcctatcaagcaatccttgaggtgttattacaattacatggacacttaatactgataaaaggcaatcatgataatcgggccctttttaaatatctagaaagtaataattatgagtttaatggacttcctaaatttcagtttcatgatgtgggagtactattaaaatataatcaccgtcagtattatttaactcattatcctcttatgttaggaatagcaccgcaaattattaaccttcatggccatattcaccactattctgttcccattaaagaaaatataaatgtaggcgtggatgctcccgaattagactatcttgaaaataagcctaaatttggagctccgctgaattttcatgaaatagaagaaatcgtagcgcaaaaagctatgaagtatccaggacaaaaataatcaaaagaaggtggaaaagatgaatagagctaagattcaagattatattgatcagcgtgaagagcaacgatctttaatctatcatattgaaaaaaaagaccagacacattttaccgttaatggacatccttacgaattagtaaaggactaccgtgacggttttaattcagaaaaattcgcagaacgatttagcagtgttctgagtaaatatgactatatcgttggggattggggatatgaccaattacgcttaaaaggtttttataatgatgataatcccttatttgaaccagaattgggtgctgatacgattgaggattatttatttgagtattgtaattttggctgtgcgtattttatccttcacaatgatgatgtttgtattccacggcacagttaccgtcagcgtcgaaagaaaactacgccagtcattcatgaacggcgacggcaggttaaacaaccgaacgtgcgtcaacggcataatcagcgtgcagaacgtgtaaaaaacggtcatcggcaaaaatttgtgattcatcaacgaaaaaagaggagctaaggcaaacgatgaaagattatcaaggatattttattgatttagatgggacgacttataagggcaaaaagcaaattccagcagccggaagatttatcaaacgactacaagatgtcaagaaagaggtcttgtttgtaacaaataatagtaccagaacgccagattttgtcgctgaaaacctccgtgaaaatcataatattaatgttacggcggaaaatatatacacaacagcaatcgcaactgctgactatttacggtcaatggcgccgataaaaagtaaaatttatgttattggtgagtcaggattaaagttggctttagaaaagcgagggtttatcttgactgatgatcaacctgaatatgttgttgtaggattagatacgaatgttacttatgagaagcttgaaaaggcagtcttgttaattcgaaatggcgctaaatttattgggaccaatgctgatagtaatttgcctaatgaacgagggatggttcctggagcaggttcgattgtaaagctagtagaatatgcaactcaagtgaaacctgtgatgattggtaaaccagaagcaataattatgaaaatggcacttgaaagagttaaattgcctaaagaaagggtaattatggtcggcgataactatcatactgatattgaagcagcaattaatgttggaatggatagtttattagtttatactggtttatcgcgtccagaagaagttataaaagaaaaaatccagccaacatataaggtgaataatcttgatgaatgggaaatttgaatttattcagtggggaagagcaatcttattgacactacttagtttagttgttgcaattagtattgctctttttatcgttattaatatctcacctttttttataacaattcctaagcacctcctaggattatctgcctctgaattaatagctgattatggaagtgtcattaaatatatccagcttccggcccagcgagtcctcgaactaagatatttaccaattgccccttctgcagttcaccattttgaagacgtaaaacatttgattttattgaatgaagctgtgatggtggtttcgctcccgttgttagtgtttggattgaaaaaacaaaaacggcaaaatcagctctggcgcctgattttaccgtttcagatgttatttattttattgctctttagtgggtttatggggataacaaatttcgatgtcctttttattaaatttcattatcttttctttagcaatatggattggctatttgatccacgaacaacgccaatcatattgttgatgcctgaaaatttttttacagtactatttggattatggttaggatttatattgataatcttacttttgatctggggatggataaagcttatgttaagcatcttctttaacaaaacgcgaacgtaatgctccgacaacggctgggattaacgtaaccacaataattgcaagaatgatgacagagaagtgttcttgaacaaacggaagattaccgaagaagtaaccacatccacaacaaagtgctacccagataacacagccaattacactataacgaataaattgcttgtaggggaaaccagaacctgctgccgcaaatggagcaaatgttctgatgatcggaataaaacgggcgagaataatagccggcgcaccatgcttttcaaagaagacttcggcacgttctagactatctttatcaattaatttaccaaaaagtgagtggttagaaaggctcttcccaatcttatgaccaattaaaaagttaagggagtctccacccaaacaggcgcataagaaaataaaaataaaaatccaaatattaagatgataacgtgggtcagcagctagtgcacttgcagcaaagagaagggaatctccaggtagaaatggcattatgactgcaccagtttcaataaatataatagcgaataaaattaaataagttgcatcgccgaattgattaacaatctgaattagatgaacatcaatgtgtaatataaaatcaataagagttgccaaagtaattctcctttgtgtaataagataatactgttaaagtgtagcaagatagaaaaatgttgtgaaggggcgtttaaaacttttaataatttttgaaaaatatatttattgtaagtataaattagttgtgtgagactagttcattcatagtcaatgacgaaaggatcattgcaccctttttgaaaaggctgaataacgtttattatcataagaatggtaaagcaaacgaaaaaaataaataaaaatcaaaaaaagtgttgacgagggagtgaaatccatgtatagtagttatcgttgtcaaagcagttaagtgctgttgagatggttaacaaaaagttaaaaataattgttgacatctacttgatgacatgatatattaataaagttgctgattgagttatcaatcaaaagaaattcaaaattaattaaaatttcttcttgacaagctaatctaatatatgttataataaccatgttgattggctgcttgattggccaacaggtagacctttgaaaactgaacaaagtttcgacgaatcaaatgtgtagggtcttcaatcacgatgtgatttgaagcaaaacatttgcgaagtcaattcgcttaacaataaagataattgagagctattcaagttcttatatattttatatgagagtttgatcctggctcaggatgaacgccggcggtgtgcctaatacatgcaagtcgtacgcactggcccaactgattgatggtgcttgcacctgattgatgatggatcaccagtgagtggcgaacgggtgagtaacacgtaggtaacctgccccggagcgggggataacatttggaaacagatgctaataccgcataacaacaaaagccacatggcttttgtttgaaagatggctttggctatcactctgggatggacctgcggtgcattagctagttggtaaggcaacggcttaccaaggcgatgatgcatagccgagttgagagactgatcggccacaatggaactgagacacggtccatactcctacgggaggcagcagtagggaatcttccacaatgggcgcaagcctgatggagcaacaccgcgtgagtgaagaagggtttcggctcgtaaagctctgttgttggagaagaacgtgcgtgagagtaactgttcacgcagtgacggtatccaaccagaaagtcacggctaactacgtgccagcagccgcggtaatacgtaggtggcaagcgttatccggatttattgggcgtaaagcgagcgcaggcggttacttaggtctgatgtgaaagccttcggcttaaccgaagaagtgcatcggaaaccgggcgacttgagtgcagaagaggacagtggaactccatgtgtagcggtggaatgcgtagatatatggaagaacaccagtggcgaaggcggctgtctggtctgcaactgacgctgaggctcgaaagcatgggtagcgaacaggattagataccctggtagtccatgccgtaaacgatgagtgctaggtgttggagggtttccgcccttcagtgccggagctaacgcattaagcactccgcctggggagtacgaccgcaaggttgaaactcaaaggaattgacggggcccgcacaagcggtggagcatgtggtttaattcgaagctacgcgaagaaccttaccaggtcttgacatcttgcgctaaccttagagataaggcgttcccttcggggacgtaatgacaggtggtgcatggtcgtcgtcagctcgtgtcgtgagatgttgggttaagtcccgcaacgagcgcaacccttgttactagttgccagcattaagttgggcactctagtgagactgccggtgacaaaccggaggaaggtggggacgacgtcagatcatcatgccccttatgacctgggctacacacgtgctacaatggacggtacaacgagtcgcaagctcgcgagagtaagctaatctcttaaagccgttctcagttcggactgtaggctgcaactcgcctacacgaagtcggaatcgctagtaatcgcggatcagcatgccgcggtgaatacgttcccgggccttgtacacaccgcccgtcacaccatgggagtttgtaacgcccaaagtcggtggcctaacctttatggagggagccgcctaaggcgggacagatgactggggtgaagtcgtaacaaggtagccgtaggagaacctgcggctggatcacctcctttctaaggaataaaacggaacctacacatcggagaaactttgtttagttttgagaggtttacctcttaaaactttaacctataagacgcttatttgggcctatagctcagctggtttagagcgcacgcctgataagcgtgaggtcgatggttcaagtccatttaggcccatatggggaattagctcagctgggagagcacctgctttgcaagcaggaggtcatcggttcgattccgttattctccattatcaaccataaggttgatagagtttgtactttgaaaactaaatactatctaatttctttattaacaaaacaataaaccgagaacaccgcgttatttgagttttaattaacgaattataatcgctaactcaattaatcagacaatctttgattgtttaggttaagttatgaagggcgcatggtgaatgccttggtactaggagccgatgaaggacgggactaacaccgatatgcttcggggagcggtaagtacgctttgatccggagatttccgaatggggcaacccaatcagcttagtcgctgattacttgactagtgaatacatagctagcaagaggtagacgcagtgaactgaaacatcttagtagctgcaggaagagaagaaacatcgattccctgagtagcggcgagcgaaaagggaagagcccaaaccaacaagcttgcttgttggggttgtaggactgaacattagagttaccaaagtgcgacgtagtcgcaacagttgggaagctgtgccatagagggtgaaagccccgtagacgaaacgtcacactctctgttcaggatcctgagtacggcgggacacgtgaaaccccgtcggaacccgcgaggaccatctcgcaaggctaaatactccctagtgaccgatagtgaaccagtaccgtgagggaaaggtgaaaagcaccccggaaggggagtgaaatagttcctgaaaccatgtgcctacaagctgtcggagcccgttaatgggtgacggcgtgcctcttgcagaatgaaccggcgagttacgattgcatgcaaggttaaggtggaaaaaccggagccgtagcgaaagcgagtcttaaatggacgtaaaaagtatgtagttgtagacccgaaaccaggtgacctacccatgtccaggttgaaggtgcggtaaagcgcactggaggaccgaacccgtgtcagttgaaaatggctgggatgaggtgtgggtagcggtgaaattccaaacgaacttggagatagctggttctctccgaaatctctttagggggagccttgaggtaaagaatcgtggaggtagagctactgtttggacaaggggctcgtcatgggttaccaacttcagataaactccgaatgccatcgatttatactcaggagtcagacgatgagtgataagatccaccgtcgaaaggggaacagcccagatcaccagttaaggtccctaaatatatgctaagtggaaaaggatgtggagttgcatagacaactaggatgttggcttagaagcagccaccatttaaagagtgcgtaatagctcactagtcgagtgatcctgcgccgaaaatgtaccggggctaagcatattaccgaaactgtggatgtgcactatgtgcacgtgataggagagcgttctaagggcggcgaagtcagaccgtgaggactggtggagcgcttagaagtgagaatgccggtatgagtagcgaaagacaggtgagaatcctgtccaccgaatgactaaggtttcctggggaaggctcgtcctcccagggtaagtcgggacctaagccgaggccgagaggcgtaggcgatggataacaggttgagattcctgtaccagttaactgcgtttgacgatggagggacgcaggaggctaagcaaaccgtacgactggaagagtacggccaagcagtaagtcaggatgtgagtcaaatgtttacatccgtgttgacaagctgtgatggggagcgaaattaaagtagcgaagttgccgatgtcacactgccgagaaaagcttctaaggagtagttaactgcccgtaccgcaaaccgacacaggtagtcgaggagagaatcctaaggtgagcgagagaactctcgttaaggaactcggcaaaatgaccccgtaacttcgggagaaggggtgctggccgcaaggccagccgcagtgaataggcccaggcgactgtttatcaaaaacacaggtttctgcaaaatcgtaagatgaagtataggggctgacgcctgcccggtgctggaaggttaaaaggatgggttagcttcggcgaagctcagaattgaagccccagtaaacggcggccgtaactataacggtcctaaggtagcgaaattccttgtcgggtaagttccgacccgcacgaaaggcgtaacgatctgggcgctgtctcaacgagagactcggtgaaattgaaatccctgtgaagatgcagggtacccgcgacaggacggaaagaccccatggagctttactgtagcttgatattgagtgtttgtactgcttgtacaggataggtaggagccgtagaagtcgggacgctagtttcgacagaggcgctggtgggatactacccttgcaatatgaccactctaacccgcagcactgaacgtgctgggagacagtgtcaggtgggcagtttgactggggcggtcgcctcctaaaaggtaacggaggcgcccaaaggttcgctcagtatggttggaaatcatgcgcagagtgtaaaggcacaagcgagcttgactgcgagacagacaggtcgagcagggacgaaagtcgggcttagtgatccggtggttccgtatggaagggccatcgctcaacggataaaagctaccctggggataacaggcttatctcccccaagagtccacatcgacggggaggtttggcacctcgatgtcggctcatcgcatcctggggctgtagtcggtcccaagggttgggctgttcgcccattaaagcggtacgcgagctgggttcagaacgtcgtgagacagttcggtccctatccgtcgcgggcgtaggaaatttgagaggacctgtccttagtacgagaggaccgggatggacataccgctggtgtaccagttgttccgccaggagcaccgctgggtagctatgtatggacgagataaacgctgaaagcatctaagtgtgaaactcgcctcgagatgagatttcccatttccttcgggaaagtaagacccctcagagatgatgaggtagataggatggaagtggaagtgccgtgaggcatggagcggaccattactaatcggtcgaggacttaaccaaggagcggtaaggtttattggaagagaatagataggatttagttttgagagcacaagctctcgtccgaagggacaaagagtgtggtgatgatggcttgaaggatacacctgtacccatgccgaacacagaagttaagcttcaacacgccgaaagtagttgggggatcgctccctgcgaggataggacgttgccacgcaaaatcaagctttggcacctggtcttaattgtgccagggcttggatattggagagttgtccgagctggccgaaggagcatcattggaaatgatgtatacgggttaaagcctgtatcaagggttcgaatcccttactctccgttaatatgacccgttagtcaagtggttaagacaccagcctttcacgctggtatcgtgggttcaaatcccgcacgggtcacttttggaggattagctcagttgggagagcatctgccttacaagcagggggtcacaggttcgagccctgtatcctccattacaacttaatagttgtatatacccatgacacaatggctcggtagctcagttggtagagcaacggattgaagctccgtgtgtcggcggttcgattccgtcccgcgccatttatggggagtagcgaagtctggctaaacgcgacggtctgtaaaaccgttccttcgggttcggtggttcgaatccactctcccccattttatagggatatagttaaacggtataactacggtctccaaaaccgtcattgtgggttcgattcctactatccctgcttaactgaatattttggcggtattggtgaagtttggttaacacaccggtttgtgggtccggcacgcgtgggttcgaatcccacataccgcccttttgattaagcttattacttaatcttaactatttggtggtatagccaagtggtaaggcagaggtctgcaaaacctttatcatcggttcaaatccgattaccaccttttagttagctgatgcctctgtggcggaattggcagacgcgctggactcaaaatccagttcccgttgagggagtgtgggttcgacccccaccggaggcatattagtactttggtacaaaattgtcagctaagctaatgaaataggagaaagcttgttattgcaggctttctcctattttttagtttaaattttgattttaaagaaatggtataaaatggtgcaaatttgtgatgaaaacacacaaaaatcacacattaaaattgactaagtgcctggacgattttgtcatcagttttacttttatattcatcaatcaagtaggcgtatgtgttcattgtggttgtgatatcattatgtccaagtctcttgctaattgcataaatatctattccgttacttaacagtaaagcaacgtgactatgacgtaaactatggaaatgaaaattcttctttgataattttgtatcactcataatttgtcgaagcgttttatttaatgctgtactagtagggatagtattaaattgatccataaaaacaaggttacttgatgaattattgcgcaattgtttaagtagtaatagtagtttttcattaacttttattttacgtgtagatgattcattcttggtgggtttaaagcgatgtgtattaaaatgttcgtctgtttcgtctcttccttttacctctctccatgctttatcaatattaatggtatgatgaatgaaatcaatatcattccaggtaagagcttgaatttcttcttttctcattccagtatatatcgcagtgactatcatataacggcttgtatatcttctattagtaattccattgattgtagtagttaataatttccttatttcagttacattagggtattctaccttcattgttttgctagtattggcagctaaagtaacacctttagtaaaatctttaagcagataatcatcaaggatagcagattgtacgcaagaccgtattattgaattaagcttctttacacttgctatagcatgagttgctccatacttgttaataaattcttgatatttagaacggttaatttctttaatagaagcttctttgaaataatcattaattagattaccgattataatataacgattcagagttacacttgatattttaggttgcttataagtattaacccattcttcgtaataatcactaaaagcaatttttttctcaatgtgtattccgcgattaagattagtttccatttcagctgcccactttttagctagtgcttttgttgcaaaaccagctttggactttgaaaaacgttttccttcagtatctttccactgaattcttacagaccattttccgcttcttttatatatttgagccatacttgtccctccattattaaattgtgtataatgaaagggttgatagaatttgtttggacgcaattaatatcaacccttggtccactgacagttgccgctgtcggtgggcttttttagtttaaatagctttttacgtcatcaatttagttggacgagaaatttagcttttgtttagcttctttaattgattaataatttcttgattttgcttaattgttatccaattttgctgtttgattattcttaattcatgaaaaagggcttttgtatcattacttgtaaaagtaggataggcacctgttaatttttcggcaactgctatatcttttacagattcgagaatttcgtcatctaaactttctaaacgattttctttaatatatttatctttgtctttagcaaatccatctttaccattgaaaatactcatttttagctttctcctatctttttaatttttacattgtaaagagcgttatttaaatcattacagttcctaagataggaaaaagcgttttttaaaagtttattcatcctttgactccttatattcctaaaatttgtttctttttagcatcaaattcttctttgttaatgattccatcatcaagtagttgttttaattctcttaattgcgaaaggtcattactagaattggattgtgctgatgtctgcttaaaatctgcagctgcctgtttaatagtctcagccatctttttagcagggtagggttgcatattttctatttgagttgtaatagctccgttggttactgcaatagatcccaacattaaacctttagaatatgaaacgccattaatcatatcaaggggaatgtcagttgatttactaccataaatcaggccgtggtcaagaaaaattacgcgcttattagtacaaaccgcaagaatggaattagtttcaacgaaagcattagcagcataaagtattttttctccaccatcgacatctattatgtctggcaaggctttgatttcctttttagtaccgaatagattttctacattggcatcctttaactgttgcttaataacatccaatttttcttgttcgcctttgttgatttcgtcaattgctgcttgtaaagtatcagcttttttaccagcgctatcagcaattgaatcaagtttctcagttactttagatagctttgatttatacaaatcaggatgttctttgtaaggtacggtagaatgaatccctaataaactttcaatttcactagcggtatgggaactaatgaaattgctaagtttaattggaacacggtaagtatttgctggacgtttgggatcaagtctgttggcatctttgccacaaattaaatatccatctttggtaatgcaagaagcctttaacattcccagggcatcattacatatgaagcatctctttttactcatttggatcaccttattccattgtcactgaatatttaactaatttaccaacaattcgacctggatgctcttcatcaagaattattggatcatagtttttattatctggcattagcataactaaattgccttgatgcttaatacgttttaaagtagcttcgttatcatcgtcaacaagaactgcagctatctcaccatcttcaacttcaggttgctctctaataatggctaatgcgccattaggaatggtaggctccatgctatcacctttacaacgaagaccaaaaagtgttccactaggaactggtttttcaaagatttcatcagtataaccttcgatattttcttcagcagtaatcggatcgccacaagcaatttcaccaatgattggaattgaaacaacttctaatccttctttaggataaataatattagaaggtttcttttctctggtagggaaaaagtcatcaacatttacattaaaaatttcagctaatttaaataaaacatcttgatttgcctttctagatcctaactcatatctagtcacagttgctcttgtcgtatcaagtttgtctgcaagttgttctactgaaaggccacgttgttcacgaaaatttctgattttttgaccaatgaatttacttagttccattttatgtacctctcttatgtaactaattatataacttgcgttaccgaaatggaatattttttatctttttcgaaaaaaatagttgcatttgttccagaatggttttaatatataattgttccaaattggaacggaaaggagagataatatgcagtcaagattatatgatttacgaaaacatgttaaaggaatgactcaacaacaaatggctgattatctaaatattagtgtcaaagcttatcgtgataaggaaaatggtaaaaatcaatttactcaagatgaaatgtttgctattagtaaattatttgatcttaatattgacactatttttttgcctcgtaagttccatattggaacaaagggctaagagaggtgacacaaaatgcaagcatcgctagatgaacaagattaccaagtaattactaatgaggttctcaggcgtattaaggaatgttacaacttagtgcctaaacaagatgtccaaactgacaaatgggtcggtatcaaggaattcacgagtaagttgcccgttataaaggacaaggaatgggtcagaatgtttctccttacacttccagtctttaagaactgggttatcaatttgaatgcaggtcaaggtcatcgaactaaggtaaatgtgaccaaggcattgccttggattatgtctcatcaagctgatattgattggaaccagtcattgccacgttaggaggtgaacagatggcacaaccgatatttgtaaaaggaatttttggaagacgaattatagtttctcaatttgaacaaacgtctgattttattttgcaaaagaaaaacgctgacctaataaaagaagccagcggattttcaaaaaacaagaaattgtttactcgttatcaaggtaaagactttcaaattatggagcaattaaagtggcaacccagtgttctttttgatgatgccagtaagaaccgtagtagccacagatttaaggacaccaatggaaactgactttagagtgttagtagctttctttgtttgtttccaaacctcatcatctcgaatggaatcaagtagttcatgcccagaccaagtgatgtcatagacagttaattggcgaaccattttattaataaatggtttggcactaatgaaaccgcctgagtagagctgataaagggtataaacaatatcatttttatcaaaggtctcattagcaataacatttgcaatttgagaatctgtaaaaccttggtaaagcatttgcaattgctgtttttctaatgataaaagaacatacctaacacagtcttgcttcaatttcacaattttcaccacctttattttgaattaatcaaagtatagcagaaagggagagcagttaaatggcgttggtaattggattaccaatattaattattgcaatgtgtttgttatatgcattggtgtacagcttattgtatgagcggaataaaccattgctattgaaagaaaagtatcggaagaaacattgaaaggaggtgatatgaactttggtaaatttatttcttttgttgttttttatctttgttataatgccgcttttgtatcaatttttgaattacatcagaaggcaaattgaaaatttcttttggaaaaaaagccataaaaataagaacgaatgaaatgaaagtagctgtaaattcaaattgttctttggtctgagttattaatagcccagtaatagtagaaagaataattgctatttttgaaagatcatccaagtatttttcgcttatttgaaatcctaaagtttctgtaagccagccaaggataaacaatggaaaagaaaagaagccagttagaaaaagaatagtaattaagcaatcaaatattctgagtttttggaattcaaaaattacagcatctggattagcagcatatgtaatatgtagagctaaataagtaaaacagatgaggcagaagatacaaaccataaagtcggttagtttcttactatagtaattaaatttggttaaaaacttaaaaattttacgcataatgattttccttttgtactgagttaatcaaagtatagcaaatgaaaggatggtagtttaatgagtaaattaattgcgctaatcgttggtgcttggatcatgtattgttcaatgattggctcttatgatggagcgatggcgatcctagcagtttatcttctgctagtggttcttgatccactaaataaaaaaggtacgactgccgcaaacagtcgtaccgataaataaataatctacgaggtaattatatatgaatgagtttaatttatcaaaattaaatgccagggttggcgataattgtgtatttgtatcgaatttggcagttcgctatcaaagcgctgctactcctgaagagcgaatggcaatggccatcaaaatggagaatgctgctacgatgttacgcatttcagctgagcgtttggccactgaaactaagaatgtttacggaggtaagaacaatgactaacgaagaaaagattaaggcaattaaacaaattcttggaccagaatacgaggaggtagccattttcgctgctaaaaaatcagaaattcgtgacgaacgtactaattcattagttgatgcggatcccggaacggtagcagccatgattatgaattggttacatactaatccgatagcagcttcaattgtcaaagcaactattgatactttggaaactgatccaactgctgatttatttgcacagatttttctaggaggtaagaactaatgaatttatttgaattaaacgacaactacaaaacacttgctagtcgggatgacttagatccaactattctaaaggatacattggaatcaattaaggatgatcggaagaccaaattggacaatcttgcttcatgggcagatcatttgaagtcagaaattgattttatgaccgacaaaaagaagtcatgggaagaagaaattacttaccgaaaaaataaacttacttggatcaagaaatatattactgaagttcttgatgatgccggtattaagaaaataactactgaaaatcacttacttagtgcccggaactttaaggcctcaaccattattgatagtgataagaagcttccggataagttcaaaattactgagacgactactaagccagataagcaggccatttaccaagcactcaaagctggagaagaagtaccaggagcacatttaaaagctaaccgtaacacggtgattaaataatgtttgaactccgtgattatcagcaagaaacgattgataacatcatgaattctataagtgctggtcaccgttctatcatggttcaacagccgccacgaacggggaagacagttattatggccgagattgctagacgagcaacggcaaagggtaaccgtatcttgttcgtggttcatcggcaagaaattgtccagcaggttatcaagactttcaaagctaatgatgtaaatatggatttagctaaaatcggcatggttcaaacgattacccgacacgttaataatttggacccaccggcgataatttttgttgatgaggcccatcatgttctggctaaatcatatcgaaggattcttgatgcttttccgaaagcttataagttactgtttaccgctactccttatcggttaggtggacagggttttactgatgtggctgatgatttaattattggcaaatcagtcccctggttaattgaccatcactttttagcaccagttgattattacgctccttcttacattgatactgccaagttaaaagtaaaacgaactggtgaatatgacactgattcaatcaaaaaagccatgaagcctaaaatctacgggaatgcggttaagcactatttgaaacttgctacgggaatgcaagccattgcctatacctataacgttgatagtgcaattaagttagccaatgcatttaatggctatgggataactgcaagcgccgtttccggaaaaacgcccaaagaagaacggaataaaatcattgaggactatcgccaaggaaaaattcaaattgtaaccaatgcagaattatttacagagggcctagatttaccaaatgttgattgtgtcattatgttacggccaactcaatcattatcgttgtacttacaatttgcaatgcgctcaatgaatccacgggaaggtaagactgcaataattatcgatcacgtgggaaatgttgaacgattcgggctgccgactgatgagcggcaatggacattagaaggtagcggaaaaaataaacaacaaccaggaacaacgcttaaacctgtatcagtatgtccgatatgttttgcttcgttttatcgtacaagtgatatttgcccttattgcggggcggcattaggagaagaaaaagaaattgaagtcgttgatgatgttcaactaaaaaaagttactaagtcacggctagcgattattaagaaaattcaatcgtcagcaattatgaataatgttgctggcaagcgtccaaacgaattgaagaatctgaaagaaatacaagcctatgccaaattaaaaggttacaaaccaggctgggcttaccactacgctaaacagcgtggatttattaagaagtgaggttgatattatgagtattttgccaccaaataagccacagaaggcacggcgagttccaagaaattactttatctacggagatacaatgtccggaaagtcatatctagctgaacgttttccaagtccgctatttcttaacaccgatggtaatagtgagatgaacaccgcaccaagtattcaattaaagaatgtccgaaagagcgatggaagcttgaaagagtcagtgattgatcaactagacaagattattcttgctcttggtactgaaaatcatggttacaaaacagtagttattgatgtgattgatgatgtagtaacactaattgaacaggccatctgttatgacaatggagtagaaacgctgggggatgttccttacggcaagggatatgcacaatttaataccgtctttcaagcatttgtcactgagctaaaagccttaccactgaatacggtttacattagccggttaatgatgctaactgatgaatcttctggccacaccgaagaccgaccatcactaaaacagaaatattacaacgtggttaacggaaattgtgatttagtgattgaaactaagcgctatggtgaccgttatatccggatggttaaagatcgacgaattcattatgtcaaagatgatattactgatccggcaatcttacgggtacttgaacatgtaaatggcgtctttgataagccaaagcagactactacaaaagagcagaatgaaattgttaacaaaattaaaaagcaaaatgtaaaggaaggttaatgaattatgagtttacgagatgcaatgaataaagctactgaaggttttgatccaaagaatgattcagttaataaatttaagggactggaaagtggtaaatataccgttgtagttgcaaaagtagaaaaccatgaaactccttggaatgctgaacagcttaactttgagttagaagttgtcgatggagaatcagccggccaaaaagaattcttacaaattggattagatgaattaacttctaagggtaatcccaatccaatgctagaaactaatttacgattggtttctaagttagcagcaattctaggtgttgaaattcccgatgaagtttgggatgacgatactttaatctacgagaacttggctaaagcatttgcaccggcagtaggaaagaccatgattatggatttgaaggttcgaccaaacaagaagaacccccaatatccataccgtaattatgactttgatgaagcggaacagccggaaacgccagaagttacagatgatgaaatgcccttttaagtaaatatttgagtcagtgaacttataacaccgtatggctgggaggccattaaggaggaaaaatgaaaaatctagttaattacgccttagcctatcaagcaaagggtttaagcgtcctcccaattgctggcaagcgtccactaattaagtttgctgatcgtgatccacttaccgccgaagaaataaagaccatctggatagaacatccatatgctcaaattgcgttgcggactgataagttcttcgttgttgatatagaccgcaaccatgctgataacattgatggttttgaatcaattaagcaattaccagcggaatattttccggaaactttaacccaaaccaccaagcatggtggccgacagttattttatttgaaacgttcagatatgcgagttaatcagttaattggttatttaccaggtgttgatgtaaaggcccaccaaaataattatgttgtggttgcgccatcagaaggttaccaatggctgaataagaagccgattgttacggctcctaagtcgttagtagtgaatattaaccaaatgcgagccagtaaccggcgaagttctccagatgatttagtttttaaaccacgtgaacgcaactcaactactgacttacttgagaccatcgcaaatggattgggagataaaggaataagaaataaaaacttagctggaatgattggtgctttattgtttcggggagtagaaccaaagtctgcttatcaattagcgatgatttgtaatgagaatacgcccgatccactaccagaagaagaagtgaaccggacatttcaatcaatgctaagacgtgatttgagaaacgggggtgaaatacgtggcggataatataattcgcaaaccaattgaatttgaattaaatactcaaggcaatcctaaaactaatagtttgaagaatattggtttaatccttgatggcgatccactactgcatggcaccttcaaatataacgagtttgcttattcaattgatgttgttaaggacattccacagctatttattgaaaaggggcaacttgatgatagctattcagcaattatgctccgttacattgaggatgagtatggggtgatgtttcaagaaaaattgttaaatatggcaatcactgttgaagcaaaaagccacccatataatccggttaaagagtatatggaaaagtgctataagaattgggaccacaaagaacgaatcaaagacttcctaccagtctatttaggagtacccagtggtgaagtaacaacgctgcagacaaaattattcttagtcggagcggtgatgaaagtctataagccggaaagtaaatttgattgggtgtttgatttagttggtggccaaggcgttggtaaaactactttacttaaaaagttagcccatggttggtatacagaccaatttacggacttcaaagacaaggataattttgccaatatgctgcgggcattgattgttaatgacgatgaaatgacggccacaaataattctgactttgaaaatttgaagaaatttatctcagctgaagaattagagttccggccaccatatggacgacatacaatccgccggccaaagaattttgttatggcccggactactaacgaatcaacctatttgaaagataaaaccggtgagcggcgtttcttacctaacatggctgataagtcccaagcaatggctaatccggtaactgatcttgatgatacgatggtcaatcacatttggggtgaagctgttggcctctacaaagaaggcttttctttcatattgacgaaggagcagcagaagctcattgaggataatcgaaagatatttatgtacattgatgaaactgaaaatcaaattgaacgggttctcagtacttgggacgatgactggattgaaagctcagaaattgctcatcaattaggtgaagataatctggttaagaatcgttcattagccaaaaagattaagtatgtaatggataaccggcatgattggaaagcaggacaacggcgaattaaaggaattagtcatcgtggttatagaaaagtgcatacagataatacactatgaatatagttaagtgtatgcagaaaaaacctattacatcaacgtttattaaggtttgcatacactactacactattttaataataaaaaataaatatatataaatactatatatgcgttataaaaagttgaaagttagtgtatgcgtgtatgcagtaactaaatccgttgagagagtaagaattaagctgtatacactactgtatgcatagtgtatgcaaggaggaaaatatgaatgaattaaaaaacatcagcacatcagaattacttgatgaactgattgaacgtaatgcattatttcgtgtagattgtggtctttatcggaattgggagttgaagggaaaatatcaatttagcgatattaaattgcctagcgcatatcctatttatgtaggaaattcaattattgaccgcatgattaagtgggagtgtgagcattgacgagtgaacataaaattcaaaacgatatccgggttgcactatcaaaacatcagtgtacagtgttccgggtaaatgtcggttcggtaaaaacaccagatggaagatttttttcagctggtgtacctagtggtcacccggacttatatggatttcgttggtcggatcatcaagtattttatattgaagtgaaaaacgaaaaaggtaagcctagagcggatcaaattagatttcatgaaatgctaactaaacgagaaattattcatggaatcgctaggtctgctggagatgcagtaaaaattgttgaggaaggattgattggttatggatatgaaaataaaaaagaaccaccacaacaagtaaaattagttgaagtaattcaggttataacctctcgtggagctggaacaaaggaggatccgataagaaagattattcagtattggagcaaagaaggcacattattagcagaaagttttggaaactaatttttctttgagtcacgtttctctatgtgctttagttgtttttcaggaagactattataaaacttatcaatttgatttggctgtgttattaaattgtctgtaattatatttaacagatttaaaagacttttcgccatttcttggttatcagttaagtctatctcaccaggatgaacagcattatttccaacaattcttacaatatcaaacgcttgttgtaatttagccggaagtcccttagatactagatcaccaatacgattatctaatgaatgtttattggaaaattcttttgttagtttatctattgccagacgagacaaagcagcagatgctcttggtgaatctctaagtacttttgccgcttcaatataaatttgtttaatatcatcgggcatatctggattaggagctgttaattttaaaggaaaactaggaaagataagtatatcttcattggattgccgattatgaaaccaaatagaatctaaataacatgaagtgcattttgcaactattaaattatattcgtattgttttgattttattttttctgcatatttccaatcaaattgagcatatacatgacaataaggacaaataataggagctttccctgtaaaatcattactaaaatatttagtcattaaattcacctcaaataagattatagcgtaaaggagtagatgtaatgctacacaaatatagaaagttaccaattgtggaagctgaacagtttgatgggtcagatgaaatgattgaaaggtattcagtgcatgtatttaatcctaatttagctaaaaacatcttctttataggtatgaacgttctagctattggtgattggattgttaaggatgaatatgggaattatcaagtggtagctgatgatatattccgtaaaagttatgagaggtgcgactaatgcacatttatgaagtaatcgttgtagctgtatttggcacagatattagccactttgttgttgctaagaatgccgataatgctaagaaaattattcttgattattacagcactcgtgatgatggtatcaggccaactgtgacaatgtatgacctaacaacaaaattaatcaatcttaataactacattgatgaggtgatgcttggatgagattaagtgacaaaattattatgacttcctttttactgttattaattgtttcagtcgtcttatcaatagttacgggaagtaaagtctggatatggatttttctttttctgatgacacttgagatgctttacaaaatttggcgttaggagcgtgactaatgaaagcaagatgtggcgattggagtactgatgtttatccagttgaaccgtttgtttatgaagtagcagctgatggtaagaaagaattttatcaatcagcatgggatgcttttagttctgaattgcatatgaaaaatgtgacggcgaagattatcaaaataccagttgttccaatgagtaatgatgaaattaaagcagagagtgttgcatttgaattaggcgaaaaaaggcattatccacatgtggaagaattcactaatagtaaaccgaggaggaaagttacatttcttcaggttgcggaagcttttgcaattataacgtggattattttaataattcttataataagtacggcgtttatgtaggaggtaagttactaatgacatttgaagaggcgttaaaacatgaagaaaataatgtgccagtattctatagcgatcgaaaatattatgtaatcgggcacaatgagttaaccgaacaatttacaattcgtgagctaagtggtaatccgttatttacggtgccggttgatgtacaagcggaggaattgtcatgagtattaaaattaatgcgcaaacagttgtatttaagggacaaagttttattcctagcaaaagtaactgtgagtattgtcaatttccatttaagaagttaatggttactaaagcatctccagatccatcagttaagacagaagtaccaatcaaagttgacggtgaggtatttaattattgtcctcattgtggacggaatttacaagggtgaggcaatgttacttttaattgtattaatgatgattgtctttattgctgggttcctattgggtaagaaaaatccatgacgaaaaaaggacccaccgtaaaagatgtgtcctcactaaaaatatttaaccataattattatatcagatagcgagggtacgtcatgcaaacaagtttgaatttagatattgattgtctgaaaactgcaagaaaggttactgactttcttgataagaagctggatcgctatctggctttatcggggaagcaacgttttgatttgaagtcaccagggatggacggaatgcctaaagctcccagccatggtaacggtagtgaaaatcgaatgctgaatatctggttggcagaagaggttgttgattgtgtgggttgcgctatgcggaatatgacaaaggaatcacaacggattttactaaatcggtattcggatcagatgttaacgtataacattgctagggagctaagtattagttcagcaacgtatagtcgaaagcaggaaaaagcgctgtgtgagtttgcggaccggtttgaatttcagttagttaagcacggtattcatactgaaattgatgatctacacgtttatcttgacgaggaagattgataaattgatgatagattattgagcgagcaattcatgatagaaatgtgataatagtattgtcgaatgattcgatattcatataataatcttcccaaatgaagtctagctattatggctaggcttttgtattatgtttaattgggtgatttttatatgattgaatacttaaaaacatttttggaggctttgagtatgaagccaaaaactaaatttgttggagttatttttggaatagtacttttatgcttaaaaccatttttaattcaatataatatgaaatggttttacaataagttttcttggattattattttaattactttattttttgtagcctcattaataattgaagtaatagttgaagtatacgaatggggtagaaacaagtataacaaacataaagttgaaagagattacgaaaaatatatcttaggcttgtctgataaaaagttggcaattgtaaagaaactttacgctaatgaacatcaccaaggatatttaagacaaaacgatactaatgttattgaattggttaatatgtacgtaattatgcaacttaataatgaaattatagtaagagaaagccaagttgaagatataaacgatcctgaatttctttttgtattacagccaccggctttacacatcatagaaaagaattcagaaaaatttaaataaatttaattagtttagcttaacggctgactttttactttttaggaggtgagtagcattactcaaaaattaacacagaagcaacaacgatttgtcgatgagtacattatttcgggtaatgctactcaggcggcaattaaagctggatattctaagaagacagctaagcagtctggtgctgaaaacctagcaaaaccttacttaaaagctgcaatcgaaaaacgcaatgctgaaattcaatccgagaaaacagctgatatgacagaggtgatggaatatcttacttcagttatgcgtggtgagcaaacagaatcggttgctactgctaagggtatttatgaagacgttgaagtgtcggcaaaagatcgtattaaagctgctgaattaattggaaagcgtcacggcgcctggactgataaaaaggttatttctggtgatgttcagattgatgtgggaatgggggattatgatgatgaagagtgaagaacaatggagaaaaatcaaagatcatcctcattacttggttagcaataaaggtaatgtttacagtgagtataaaggcggcttgcttaaacagatgaaagatgcttatggatattctcaggttaatttaaaccgccgctccaaaaaggtgcatcgtttagtagcggaagcttttatcccaaacccagacaaattgcctgaagttaatcataaagacgaagataaaaataataaccaggtggataacttggaatggtgtactagcaagtacaacatgaattatggtgacgtggagaaaaggtcaattctttcacaacaaagccatagtacttggaaaatttatcaatatgatttaaacggtaatttggtaaaagtatggaattcagcgagagaagccgacagacatggattcaaccgtagaagtgtgtatcgctgttgtgatggggaaataaaatctttcaaaggatacatatggtcaagacaaaagaaggtgataccatgccaaacatcaaactaaattttcctaaaccatacaacgttttcaataaacaaatttttgataacttgtttgattacagtcatttcgttgaggtttggtactgacttatggcggtgcatcttctggtaaatcgcatggtgtggtacagaaagttgtacttaaatcactccaacactggaaacatccccgcaaagtgctatggctgcggaaagttgatcgaacaattcaagaatctatcttcgctgacgtaattgactgtttatcaaattggcaattgttatcgttatgtagagtaaataaatcaaaccgtactgttcatttaccgaacggtgcggttttcctgtttaagggtatggatgacccagaaaagattaagtcaatcaaagggttatctgatgtggtaatggaagaagcttccgaatttacacaggacgacttcacgcagcttaccctacgtctccgtgaacctaagcataagaaacgacaattgttttgtatgtttaatccagttagcaaattgaactggacttataagcaatggtttgatccgaaagtgaaagttaatccggaacgagtatcaattcaccaatcaacttacaaggataatcactttttggacgctgataacattgcaacgattgagaacttaaaacaaaccaacccggcctactataaaatctatacgctgggcgagtttgctacattggataagctggtctttccagagtttgaaaaacgtcggttaagtattcgaaccttatcacagcttccctcgtacttcggcttggactttgggtacactaacgatgaaacagcctttatgcacgttaaagtggatgagagtacccgtaaaatttacgtgatggaagagtacgctaagcacggtatgttgaacgatgatattgcccgaataattaaacaaatgggttatagcaaggaagttattactgctgatgctgctgagcctaaatcgattgctgaaattaaacgcgatggtatctcgcggattcgtccagctaaaaaggggaaggacagcattatacagggactttcatttatgcagcaatatcacttagtcgttgatgaccggtgtgtgaaaacgattgaggaattggaaaattatacatacaagaaggacaaacaaactggtgaatacaccaatgagcctgtcgatagttacaaccacgaaatcgatgctatcaggtatgctttatctgaaatcaacggaatggctagtccaaaggcaactgtaatgaaaaatatttatatttaggtggtgattgaatggaaacagtaaacggtaaaggacaaattttagatggccatatttttatctatccagctgatgaagaagaacttgatccgcatgatttactgtcgttcatgagaagaaatattcagtatgctaaggattacaagcataatatgcaaatgtatctaggtaatcacgatatcttagatcaacagcggcggatgtatgggccagataatcggctagtagcaaatttaccgcattatattgttgatacttataatggattctttactggaatcccacctaagattactttagatgataagaatgagaacgaagcattacagcaatggaatgacactaattcgttccaggacaaattgagtgaaattagtaagcaaacggatatctacggacgttcgtttgcttttatttatcaagatgagaacgcagacacttgtattgcttatgcttctcctacagatgccttcatggtttacgatgatacggttgctagaaaaccttttgcttttgttcgttactggaaagatactgaaagcggattatggaccggaatggtttattacgctaataaaattaaaacctttaaaggtagtgttgttgaagattcagatcaaaataatatgtataatttagtgccagcagttgaattttatggaaatgaagagcggcaaggtgtttttgataatgtgaaaaccttaatcgacgaattagacagagtgttatcacagaaagctaaccaagtggaatattttgataatgcttaccttaaaattcttggtcttgatttagatgaggatggtgatggtagaccggatgctaatttaattggtaatcaaatgatttattcgcctaatgctgatgctgctaatgccgatgtcgaattcatttcaaaaccagatggtgataatatgcaagaacatattattgaccggcttgtttcaatgatttaccaggtaagtatggttgctaaccttaatgatgaagcgtttgctggtaatagttctggggtggctttgcaatataagttacttccaatgcgaaatatggcagctaataaagagcgtaaatttactcaggcactccggaagttatatcgaatagtgtttagtgctgatcaagtagtcaaagataaggaagcctggcaagacttgctctttgatttcaaacaaaacttaccgattgatgtttctgaagaagctgatactttacaaaaactatcaggggttgtgtcaaaagaaactgcattccgaaatagtcgtttaattgatgatcctaaaaaagaagttgagcgtatgcaaaaagagaagcaggaagaaataaaccaagcgcttcaacattctgcttctgctacagatcaaatgctaatggatgatcaaaaagaaaatgataaagagatagttggtttccggaagaacggtgaatccgatgacgaagaagaataattattgggctgatcgtattgctcgggaacgtaaatggcaagaagagcaattaagtaaagatgctcaatttaatcagcgccttcaacagtattatgatcaagcaattgtccagattaataaagacattgaagatcagataaattctttagctgtccggaataaagtttcttatgctgaagctcaaaaagaagtgtccactaccgatattgctgattatgaaacagaagctaagaaggtagttcaggaagctaatcgtttaagagcacaagggaagcatgttacttacaatgatttctctgatgaagttaatgaacgattgaggaattataatacggcgatgcgatataaccgattgaatttattgaaatctaaaattggtttatcgatggttgaagccggaatgaatattgatgctgatatgcaagctaaaattggtaaagattatactgatgagctaaaacgtcagtctggtattctagatcattctaccgaaaatagttcgttttggacttctaaagatgttgcgaaacaagtaatgaagcaaattaatggagcaacttttagtcaacgaatttgggctaatcaagatactttgaaagctcaacttgatacggttatcaccaacggaattttaactggtaagaatccgcgagttgtagcaagacaattaagagataaagtaaaagtcactgttaaaaatcacagttatgttactgaacgtattgccaggacagaatcagcacgggttcagtattctgctcagattgaattaatcaaaaagaatggttatcaatttgtccactggattgcggagccaagagcctgtgatgagtgtcgaaagattgcgacgcaagataatggctttggtgatggtatttatcgaattaataaagttcctaaaataccagacgatactcatcctaattgtcgctgttcaattagtgagacatgggtcgatggtcaacgcaatatagcattatctgatgatgaacaggcggcattgaataattatattagttcagattcatataagattaatgatgatttgaggcgtaataagatttctaaaaataagaaacaatttattgaaaacttagatgccgcattggctaaaatgccaatttatcatagtagcaagccactccagcgtgattatttctttgataaacaagaagcattggatgattttattagtaattttgaaattggtggagtcttcactgattcatcatacatttcaacttctaaaatttattatggacagggcaaagagacaattcatgttattattaaatcaagtaagacaggaagagatatctctgagtttaattttaatgagcaggaagtattattccccagaaatagtaagtttaggattgatgatgcatacgttgatgataacgggaagatgacaatggtttggagtgaattagatgagtaacaagccttttactgataaacgttggcgagataattctttggaaggcgttaaatttgataattcaaaagtaacgtcagaacaaaagaagaagacagaagaattccatgagttattcaaaaagacgtttgctaaacaattaaaagaaaaacactcacataaaaagtaggtgatccaatgggaaataatgatttctttacggtaacgtacaaaatactaagttatcttaagtattgttatgaaaatggaattaatcctgatcctaatattcttaatgctgatacatttaatattagtaaagttcaatttggaagaactctacaaatgttaagcgagcatggttatatttcaggagtgagatttacacaagccaaaatcgaaggtactgttgttggtggactccacaatacgtcaataacggttgaaggtctgcaatatttagctgaaaactcaatgatgaaaaaagcatatcgaatttttaaagaagtcagagattggcttccgggtttctaagcattcacaaattagtgagtgctttttgttttggactttttacttgttgcagtcgttaaagaacaacccggatattacagtccaccggactataaacgaggtgtatttatgtttgaaaaattaccaatgcgtttacaattctttgctgaagatccaacgccagatccagataatgatggtgcacctgaaggaactgatgatggagataacggtaaaagtgaaaagacatttactcaagcagaattaaacgatattgtcaaagcccgagtcaatcgagccttgaagaataagcaagaggaaattgaccaggctaagagtgaagctactaaacttgccaagatgaataaggatcaaaagcaagaatataagcttcaacaaactgaaaaacgtgcccaagatgctgaagcagaattggcccgttataaaatgcgtgatacagcgaagcaacaattaattgatggcggttatgacaatccaactgatgaagatatcgatttaattgttactgataaagcagaaacaactaaagaacgtggtgaagcatttcttaaagcttataaccgaattaaagaaaatgttcgtcaagaactattaaagggaaagtcaccacgaattaatggtgctcctgctactgcaatgactaaagaacaaattgcaaagatcaaggatcccgtcaaacgggtccaagccattcgggataacttatcccaatatgaaaaataaaaggaggaatataaaatggctgaaactaatttaacgacaagtacagacctagttgcacaatctatcgactttgtagaacaattctctggaggaatccaaactttattgaatgcattgggagttattcgtatgcagccaatgactactggttcacagattaagatttacaagtcagaagtaactaaggtcgatggtaatgttgctgaaggggaagttattccgttaagtaaggttactcgcaagctagctaatactttgacattaggatttaaaaagtatcgtaaggtaactaccattgaagctattcagtcagctggtggtgctacacctgctatcgtggatactgataataagctacttcgagaaattcaaaaggatgttaagaaggacttatttaattacattaccaagtctgatgcaaacaagactaccgcctctggtgacgattttcaaaaggcaatggcggcagctttaggacaactttcagttaagtgggaagactacgacacacaaactgtcgcctttgctaatccgcttgatctatatgcatggttaggtaaccaaactcttactgttcaatctgcctttggtttgcaatacattcagaatttccttggctttgacactattattctaagtgctgaagtaccacagggaacgattgctacaacagttgcagataatatcaattacttctacgctccaatttcatccgttggtcagttatttaacatgacttctgatgaaactggtttaattggtgtaactcatgatgcagttaataacaatttgtcatacgaaactgttgtaacaatggctaatgtattgactacagaacgtttggacggcattgtattgtcaacaatcagtggtgctaagtctgctggtaagtaggtgattgaatggaccagaatacggttttgcaaaacttaaaagtaatgcttgaaattaaaaatgatgaccgtgatgctttgctgaaactaatcattgataatacagaccaagcattgcgatttaagctagaactaactgaagacgaaaatttacctggagaactaggttatattgaattagaagtttcagttcgacgattcaatcgactgcaaaacgaagggatgagtcaatatagtcaagaaggggaaagtattacttttaattcttcagattttgatgatttccttgatgatattgatttgtggaaacgacgacaccagaaagatgttaaatctttaggtgccgtttcttttattaatccttatgcggggatgagtaaaaatgcgaaaaacacagataattaagttttattttcaagatgaaaatggctataatccatatgcagaagaagacacgattactagtcctaagctagtagcacaacggtatgccaatgttactgatgtagggacaaatcgcctagttgaattatttagcaggctagatcagaacgccaaggtaattcgattggagtctccagtaaatgactcttggtcatatctgactattgatgattgtcctatcaagtatcgtcttgaaacctgtcggaaaccattaaaaggcacaacgctgattgtaggtgaagccagtggctaattcttttaaggttgatgttaaaggtactaaagaactagcgaatttcttaaagaagaataaagatttgactccagttaaacggatagtcgcaaaacatggagcaggtctcaaaaagcaaacgcagcaaaatatgaacaatttgtataagggccactacgaatggaagaagggggctgggctaacaatggttagccctaccgggaatactagacggtccgtaacaaatacaatttctaataatggtttaacagcaacggttgctccacaaactgaatatttcccatatcttgaatatggaactcgctttatggcagcacgaccgacattacatccagcgtttgcaattgagtctatgaaatttgctaatgatttgaataagttatttaagtaggtgagaaaatgtcaccaagtattgaaatttatgatgcagtttttgctcaggtccaaaagcattatcagacctacgatcacccaccgcagttaaatgaaccagttacctatccattcgtggttgttgatgatagccagtcgattttgacgaactataaaacagccacaggaatgcgggtaactttaatagtccatgtgtgggggaagtctaaccaacgtaagactgttactaagatggttgatgaaattagtcgtctggggatgcaagcagttcggacgaaacattatgcttggcaaggacgacctaatgagcaagaacaacaattattaactgatacgagtgttccgaatactgtgttaaagcacggttatttaacactcgtttttgatttgaaataaaggaggataaatatggcaacatatccagtattggaagggaagaatgcagttctttttgaacgactattagaaaatgcaaggaaagagccggcacaattgatcccgtatcaaacatcactaagttatgatcctaaacgggatactgattcaacaactacgaagatggggaatgttcctactgcttctaatattgaaacagatttagaagtagagttcctaaatgcaatttccaaagctgcagatgatgtttatgattctttgtactttaataagaagattgaagtatggaaggttcatattgatcgagtccggtcagatggcaaagtttatgccgaatatatgcaaggaattgtgtcagaagactctaatgataacgacccagacgatcattcaactcgggatgtgacctttacgattgatggcgtggccaaacgtgggtgggtcactctaccgccagaaatcaaggaagaaattgactatgtattccgtggcttggcacagcttaaaggcgatgacgacaacggtgaaggtgaagcttttgctgatggcgatcgtggtgctggtgcaaatgaagcagtaacaactgaataggaggaagattatgaagttaaaaattaatggtcaagaccaatcatttgtattcggagttaagtttttgcgaaaacttgatgcttatcggggcgctgaacaagaaatccaaggagttaaggttaagctaggaatggggctagccatgatgcttccccaattaatgactaaggatgcggccgctttggcagacgtgttgtactgtgcggctaagtctagcattaagttagatacaattgatgattatattgataattgcaaggacttggattcattatttaatcgggtaatgaatgaaattaaggcaagtaatgccgctaagccgattgcaaaaaatctaaaagcctagatggtcctgagcttagttcagaacaaagctatcacgaaattcttttgaattcgttggcttatctaggctttcataatatttcagaaattgaagaaatgggattggctgaatatcagctccggatggaagcctataacctccaacgggttagccaggaacgagacttagcattgcaagctttccttaatcagtcggtacaagcgacgaaagggagcgaaaagcacccaattccgaagtataagaagtttagccaattttttgattatgataaatttgttgatgatgttcgtgggcactatgagcctgactatcagccaacaagcaaggccagccttgaaaagaaacgaaatgatctaatcgtcaagcggtggcgtgaattccggaagatgaaacaaaaacagagaggaggtaatggctagtgtcacaatcaatgagagttgaagcggtattatcagcatacgatgagagttttagcgcaaccttagataaggcgcttaaatcgattaataatttaggccgtgaaacccagtcaacctctcaaactgttagtgcaggtggttctagtatttccagtacctttaaatcgatggctggagcaatgggtgtagttgcgattgctggtaaagcatgggacgttgttaaagattcaatgagtggcgccattaaccggtttgatacattaaacaagtatccggtagtaatgaaggctttgaattattcaactaaggatgttgcaaagtcaaccgctatcttatctaagggaattgatggattacctacttctttgcaagacgttacaagtgttgcccaacaattagcgccattaactggtagtgcaactaaggcttctaagtcggcgattgccttgaataatgccttccttgcctccggtgctagtgttgccgatacctctcgtggacttcaacaatacacacaaatgctttcaactggtaaagtcgatttaatgtcttatcgaacattgatggaaaccatgccaattgcattacgtaaagtcgccaattcatttggttttactggtaagtctgctgaacaagacctttataaagctttgcagtcaggacaaattacggtagatcagttgaatgatcgttttatcaagctgaatggtggagttaatggttttgctcaattagcaaagaaaaatagtgaaggtatcggtacatcttttgcaaacttaaaaaatgccgttgtcaaaaatctggcaaatatgttatcggcaattgacaatggttttaagcaagcgggctttggaagtattgcacaagtcctagacaacatgaagggtagtattaattctgcttttcaagttattggaccagttgttactaatgctactgttgtagttcttaattttgcaaaggttataggcggagcgcttaaatctgctttcagtaatgatatttttaaaacagcagttgtgggaatattaggctttgtgggtgcagttatggcagcccataaggttatttcaatatttacaacattaagatctgcaatagttggtttaagtgtgattacaaaagctggtaatttggcaatggcgtttagtgaagcaatgtcaacacttgctaaaacttctaagattgctggtggagcgatgaaagcattcagtgcggtggcctcattaggtccctggggaattattgctgttgcaattgcagctgtggttgcagccttaacttatttctttacccaaacgaaaaccggtagggctttatggcaaagttttactacgtggttatctggagtatggcagagtttggttggagtggctactactgtttggaatgcaattggtaatgctattaatgcagtagttaattttattaaaccttattggcaaggattattaacattctttaccggaatctggacatcaattgtggcgggtgttgctccaatttggcaagggttagttaatgtctttaatagcattatcagtgcaattttagccgtttggcaggctttagctccaattattgttccgattgtagctggtgtagttgctatcattggggcaaccctaattacgattgttaccgtctttcaaactgtgtgtaatatgcttgtacccattgttcaagttgtatggcaattaatttcaacagttgtatctactgctattacgatgctaggtacaataatccaaacaggcttggcaattatcgttgctatttggaatgtggtctggaatacattcagtattgttgtaagtacggtatggaacgttattactactattatatctaccgtgctgaacgttattgcgggaataattcaagctatcactgctgcaatacaaggcgattggtcaggagcttggaatgcaattcagaatgttgtatcaactgtttggaatgcaattgccagtattacttctagtgtattgaatggaataaaaggaatctttgatggtgtaatgaatggtttaaagagtattacttctagtagttggaatggtattaaatcgctattcagtgaaggtgttaatttcattaaatcagttgttcatatagatttaggtgctgctggtagagctatcatgaattcactttggaatggaatgaaatccatttggaatagtattaagaattgggttagcggtattgctgattggattaaagaacataaaggaccaatcagttatgaccgtaagttacttattccagctgggcaagcaattatgaatggtcttaataacggattgattaatggattcagtgaagttcaatcaaacgttagtgatatggctaatcaaattcagcaagctattactaatccaggctttgatattggagcaagtattggtaacttgggttcaattaattcaaattatactggtagcctggcaattcaagatagtcagttacaaatgcagaataatgctttgcttcgtcaattacttaataaagacacgacaatggttcttgacgatggcactcttgttggctatacagcggatcaatacgattatcgcttgggtcaaaatacagcattgaaggataggtggagccgatgaaattcttaaataatgactattcttttcgtggattaggacccacaaaggatgatccagaatacttagaaaatgcagaatatatcgactttgccggttttaattcttctgattatgattggtggttgattgatcgaacagcaactacgccagaagaacaagaaattacagaaagcgtcccttacatgcaaggagaatatgatttctcaatgtatgatcaggaacgtttttttaagacccgtgagttgacttataagtttgtatattttggtgaagtttatcaggatcgtaaagcttacgaagaggagcttaaacggcaattactgccacatggtttcactaaactaattgattctcatgatcctgtttactactggtcagctaagtgtactagtgttgaggttgaggatgaccaagaaaagggaatgctcacagcaactattactttcaaggcttatccttttgcttatactaatcataacgagggcaccgattattgggatgatgtcgcatttgatcattggatttggcaaccagttaaattcaatgttaacggtgatcaggatgttaatgttaagaatatcggctcacgaccagtcgaatgctcatttcaattgacagggtccataactttgaagaacgattcaattggtgaagtaggtttaactcaagacaattttaaaacaaccacgattgtattagagatgggtgacaataaaatgcatctatccggaaacgggacaattgaatttcaatttaagcgtgaggagatgatttagtgtaccgaattattggttataatgaaccaacagataaagcaggatttattgtactggatccccgagttaatcgtcatattagttcgggaaaactcacgcttaaagaatctaatattgatgatttgactattacggttaatcaagcaagtccattatgggacaacgtaaggccttatcatactcatgttaacgtttatgatgataatgaacttatttttcgtggacgagctatcaaacctaaaaagtcgatggaagaaagcggacaattcattcgtgaatatgtttttgaagatattgaagcatatctcatggatagcacccaaagattttatgaaggtgttggtcaaacgcccaaagaatttttacaaactttaatcgatgttcataattcacaggttcctgactataaaaagtttcaagtccggaatgtaaatgtcactaataataaggatgaccaatatcgacaaattgattatcccaaaactagcgatgctattaatgataaattagttaaatctcttggtggttatattgtgactacttacaacgctaacggaataaactacattgactacttaacggatattggggttgatcataaagatgatactcctattcagttagctaaaaatatgaagtctgcaagtatgcaaattgatcctactaaggtgattacaagactgattccactgggaaagacactagaaccatcaaaagttgatgtaagtgatgatgatggagagggcggttctggatcattagatagccctgaagaattttgtaaatcagaaattaatgctacttggggtagtgatattaataatatgaaacaagattttgccgctcgttcttcgagagttcgggcttggggagtggacgttaatcgtttatatgatgtggtgaaaaatgctggagtaagtcctgaatggttctttgcttatgaacttcaagaacaaggaacttactatggatggcttaaccatacttatcgacacggtgatgcgtatagtgatgcgcaatctgtttgtgagtggattaaaaattgttcaaatagtaattccattaatccagcatggagcgcaccggaaggatcaatggcgccgaatcaagcattagcggataaatggaatcaagagtttggaaaaggtactattggccgcgtttatttacaagggactgccgctgctgtttgggatttagctggtcaaacgcctaatccagctattggaaagccaattagtggatgcatttcttgtattaaacgttggggtggtcattctaatgcagctggtggtacatggggatggccttttcctgatgttggggaaggtcatttttctcaagttcagagtttcggaaatgatggcggatatcgtcaaaatagttatcacgatggtgtggattttggatcaatagatcatcctggtagagaagtgcattgtattcatggtggaacggtaactatcaaatcagctatgggtggcttaggtaattttgtggttattcatacgccggaaggattcaatatcgtttatcaagaagcttttagttctccctctaatattattgttagtgttgggcaaaaagtaaaaactggtgatgtaattggatatcgtgatacagaccatgttcatattggcgtaactaagcaagatttttatcaagcagttcgaaattctttttctcctgcaggtggttggctagatccagtaaaactaattaaagaaggtggcgatgggtctaaaccacaagaaggaaagaaagatcaaactgttgataatagtaatgctgcacgtcctaaattaaccattactactgtcaataacggtagagactatattgatattcctgatttacaaaaagaattcggtattattgagggaactgttgaatttgataatgtagatgatccgaatgttttaatgcaacaagctcaaacatggataaaggctcaaagaatacctcaaagttgggaagttacagctttagaattacatatgacaaacttcaaatcttttaaggttgctgataggtacatgtttattaatccaaatgttgcaaaaccccaattattacgaattactcaaaaagaaattgatttactaaagccccatgcgtcttcattaacgattggtgataagacgatggggcttactgattatcagttagaaaatcaagtcaattttcaacaatttaaggaaattcgagtgatggttaatcaggttgtccaaacccaagagcaatctgctaataacaataataaggttatgcaaaattttgctagtagtgctgatcttgcacaaatgagacaggatctaagaaatcttcaagatgataacgatcgtgctcgcaaaggaatggtttccttagaagaattcaataaactaaaggaacaagtagaaaaactaacaacaggaggcgatgataatggcaagtgaaacctatgattatgagtcatttgataatacggatcatactatgaaacaaatcgctgacgctattcgtcacaagggttatggaaaagatgtgcgtgaggcaattgcacagggcttcgaaaacttagataaacatttaagtagtattgaagaagaactgaaacaacaagaaaagaaaaagtcatcgtctatggatgatatttttaattcttttggtaagaaggagtgatgataaatggcaaaagagattagtaatctgattacctttaacacctacaaatttgaacgaggcggccttttggttgatatgtttaaccaatttaatgctcgtgtaggagatcaaggaacggaattagccatccagtgggaaactagtaagactgaaactaaaattaatttaaaagaacgaggattacatttctttgggacaggttcagttggacagtaccttgaaaaattagaagatggaactggctttaagatgtctgcagatgcatctaccgttgaatgggaagataaagatgaagctggtagtttagacgatggaattacggttgttaagttgccaaaacaatttttccctcaaaaaggtattttctttggttactttggcctaaaagatagacaaggtaatatctttactagtgttaatgtttggttccgtgttcttggcggtgttccaacgatgggggctgctattccttactttgttactgaatttgatgaagtattagagcgatgcaatggtaagattattgacgctttagcagaattacgtgaaaagtaccaggcagaagttaagaagaatgaggatatgtctgcggaaacaagagcagcgttgagtaaacttgctgatgctgttggtgcaattcaagcgcagattgatgcaggtaatgtaattacacgtaaagaatataataatcttgctaatcagattgataatcgccttagtaaaatgacacagaacattgagagtttttcatcactcgatgacttaaaagctcaatatcctaatggaaaagatggactctttgttactaatgacaataatcataagtatcaatacaagaatggatcatgggtagatgaaggtatatggacagttactacctttgatccagaaacgcgacgacgccttacataccttgatacatctaattctattttgcaaaaatcactcagtgaattgactaaagaagtcgttgatataaattggtttttaggcgaaattgatgcaaatactggtaaaattacacctcacgaaagttttaatcgtgcatactcatcactcaaagtaattggtaaatcacatgcttttgaatttttgcttaatactgattatttgcaatatattagtatttttgaattcaattcaaatggggagattattaagcacgatagtgttggcgataaagcgatatatacatttgaaaaggatacgactgcggtaaggtttcagattactagtactgctgctactatgaagcaaaatgatttacgcgatactattcaaaatagtgggctaaaaattatcgatcgaggacaccgttcagtaattaatgatattgatcatttatatatccgtgaacatttaatgccgattgaagcaattgaaggctatacaattaacactaatgttgattatggtgaaactgttgatgtatcacatccaatagtaacgtctgcgtttcaatatattaatcaagtatgtaagccgggcgatattttcgtaattaataatctatctggaggctttaacgcaatggcttgggcctttattgatagcgagaaccggttaattcaaaaatctgaagtaaacttatctcaatctcaggttactttatatgcgccaagtaatgctgcaaaattaattatcaataatatggatagtaactgtacagcatatagatatactccggataaagaacatttagctaaaattaatattgctttaactaccaatattcatcgaaatatcaagttagcttatcaaacaggagaaacagtctcattaattcctgaaaaagtaagtaattacaaatatattatattagattgtaattttaatgatgctttcagaataaagggttatggtggattgaatccacgattatatggatttatttctgagcaaaacacattaatgaatgttgcgcctgcaaatgttaatgatcaattaactgatgtctttatcaaaacgccaaaaggcgccaaaaaattagtagttaatttcaatcttgatcaacaagtaaatcccaaacaaattgctgaactttataagcttccagacattaatgttattactgagcaaaaaataaaaaagaatttattgaatcaacaaacagtcgatacattaatttctagttatatgaatggtatattacttggtaaagatttagccaatcatcttgcggattttgctaaaagcggcgataaaatggttcatgtatcaacgttttataaagttaacgatactctttttatgtcttattatgctaatacaagatcggcttacgaagatccaacccagcatacagcacgattagtttatgcaccgtttgagaatctaaatcaacaaacgtacatcgatgtagccgacattggacaagaatataatggtcaaaagattgaagcaatatacgattctttgcttcttaaaacaagtgatgattcatatatgatctatgcctttactgctaaggtaggtggtaagttctatatgctttaccgtcgttttgatcctaagactaagctgttgagcgatattcatacaatgaattttaaagttggagtaatgacgtcgacatttgatacagtaagcgttcatgatttgttagctaaggcaggaattgactatgattatgaagatcgtgatatttcctttgtccaaaaattaagtccacggattgaagatggcgtagtgcaatactatgcaggtatcggaatcttacatttttgctttgtagtaaaatcaagcgacttaatcaactggacttttgtcagtactccagactttatgtacaagccagaatttgaaccttctgtatatgttaagggagacaatgtttattatttttgtcgtcagcgagggacagaaggtaatgcagttttagctaagtataatatccctaatggtcaatggtcgaatccgattcttgtaccagatactcaatcacgctatgactttttcgagaataatagtcagttgtaccttgttcattcaccgctagaccgtaatcatattagtttgatgcagattgatcagaatgttctggaaaagagctatgaagtagcaacagcagtagtacaagattgcttctacccatttactcaaaatattgatggtcagatgtatatgagctttacacaaagtaggcaacatatttggctaaataaatttaatccccacagtctgctagatagtgatgtagcaactattttcagtaatttaattgagtagcaaaacatagtcgccttataaatacacaatacatagaaagttgcattgcttaaatggaaacttaatgggcggcttatagacttttattatttaaaagagtatactggaattattctttttattgggaggaaatataaaagtgacaactaaagtgagagataaatcgcttgatattatccgggggagcatccttctagttgtcttgggtcatatatctgggataccttttgagttaaaaaagtacatatattcttttcatataccactgttcttttttgtttcgggatatttgttcaactttgctaaatacaggtatttttcttataaagagtttataaaatataaagctaaaaaatatatcctaccttatttcagaatggggttgatatgtttgcttctatttggcatagtttatccactatttgctgaagggtttagtaaacagtatatgcttcaatctacaaaatatgttttaggtttactatactcgcgtggaggtcctaattatatggcctggagttcgccactttggtttctaacagccttatttattgcagagattattttttttgtggttctaaaatttaattttaaatatccattaatagtgtttggaatcttagctatattgagttatatttactcgattacaattaaaattccgttaccgtggaatattgatgttgcaatgtttgcagtgttattcatgtacctaggctttattacacacaaatataatttaactaagcacattaacttaccggttttcttacttttgattgttatttttgtattatctgtagcttacaataatgagattgacatgaatttaagaaactatggcaatggatttttaacaattattagtggaacaataggtactgttatatgcttgcaaattgcgcgattgttaaaagagaataagatattagagttttatggtaaaaacacattatttatcatgggctacacgtatgctgtgtttaattgtattttggctttaagcagccattttagtactgtaaagaatgttgtagcttcgtttttgattcaaattataattttaactttattaatagtactgaagaatttattcaaacaaataaaaaagcccatttatgcatatactaggaaaattaacaattaaaaaaactaatacgtcctactcagggcgtttttattttaccttcaaaggagatgatcaacattgccctatcatttatttatgctgcaccaaatgcagacattagttgatgataaactaatgtgggcttttacaatcgtgatgattgtagatttaattacgggaatgattaaaccgtattatgcaaagaaaacaattaagaaaactaatagttcagttggaatccctgggataattaaacacacagtaatttatttagtggtagtaattgcttatccatatctttatacgattggagcaagcacgatggctaccacttttttaattgcttggatttatcaatatttaatttcaattgtagaaaattggacagagatggggtggtggttgcctaaaccaatcatggatttctttgaagccaaattagctaaggatcaagaagattatgacccatctaagtacaattttcttggtaaatataaaggaggtaaaaagtaatgacagaacgaaagacagtaattgatttagctagttttcagagtcacttaacagttaatgattacaaaaacatcggtgctgactatgcaattgttaagacaacagaaagcacgaactatgttaatccttacatccggtcgctgattgatcgaagcgcaggtggtggaattaggggttatgctttctatcactttggccgtttccataatgatgcacaagcggtagcagaagccaactactttatcgccaattctaaggcacaggcaaatgtgcaacccggtacattaatgattcttgatgctgaaatttctaacatgccaacatcatcagtaaatgtgttcttaaataccttacgcaacgccggttatcacactggtttctatacgtataagtatctgttgcctaactttgacttagagtcaatccatcaccatatggatatgttctggttagctgcatatgtatatcgcaatggaacgccagcagggaagaacccagactttaattacttcccgtcagctaactatattgatatgtggcaacataccaataatttgcttggctacaatgttgatggctctatcacattaaccgataatgcaatcaacctatttaatccaagcgaagcaccagccccagagccaaacaaaccaattgaacaagaaaagccagcaattaccactgaacttccaactaaccattgggttgatgatcttggtgatcgttggtttgctgaaaacgggacatttattactggcactgcaattaacttgcggtggggtgctaagactaacagtgccttaatcgctaccttaccagctaatagtgaagttaagtatgacgcttggtctcgccacgatggctatgtatggcttcgtcagccacgaccaaacgctcagtacggttatcttgtttgccgtgatgcaaataataaccagccgttcggtacgtttaaataggtaaaaatttaattagccctagtggttattgcataatttgcgatagtcactagggctttttttacgaacacacaaaaatcacacaaagaccagttaaagcctaatataataggaagagttttgcccaccggaggcatattagtactttggtacaaaattgtcagctaagctaatgaaataggagaaggcttgttatagcaggctttctcctattttttgtgcgcccggcatgggtattagctaggcggtgagagtccgctatgggccgtagtagtcggaaccatgagctgaggacaagggtgtccactgtgaggtggaatctgaaggaagtctaaggcaaagtactgcaccgatgaacaagaagtagctataaggctggaactaactggataagactgcatgacaagttaaagtccaacactactcgaagttactttcagtaaagctaccggtgacatggtacgaaagttaatatccttacccggggagatctggcctacacgtttccgacaagaggaataagtttaatttccacagaaacaagcggtgcagtgatgtagcgttgagtaagccagaagtcagccgaggtcatagtagtctgagtaatcagatgaaggactgaacgacaataacttgtaacttatatcggaggtgtaatcaggtgcgacaatcgcagaaaacagaacaacaagctgaccgcttgtcgaggataggtttggaaaaccgaaagtacacaagggcgcgtagtaccgattatggtgaaggtaaaggtatgagtgtcactatccaagacttagtcttggaccgcaataaccttaatcaggcttatttgcgagttaagagaaataaaggggcagcaggcattgacgatatgacagtcaatgaccttctgccatatctcagagaaaataagacggagttgatcgctagtttgcgtgagggcaagtataaaccagcaccagtcaaacgggtagaaattccgaagcctaatggtggagtaagaaaactcggaataccaacagtggtggaccgaatggttcaacaagctgtggcccaaattcttacacctatctttgagcgtgttttctctgataatagttttggcttccgccctcaccgtggggctcacgacgctattgcaaaagtagtagatctttataatcaaggttatcgaagagttgtcgacttagacctaaaagcctattttgataacgttaatcatgacttgatgattaagtatctccaacaatatattgatgacccatggacactaagactcattcgtaagtttctaactagcggagtcttagaccatgggcttttcgctaagagtggaaaaggaaccccacaaggagggccattgtcaccactactggcgaacatctatctaaatgagttggacaaagagttgactagacgtggtcaccactttgtgcgctatgcggatgattgtaacatttatgttaaaagtcaacgagccggagaacgagtaatgcgaagcattacccagtttcttgaaaagcgattgaaagttaaagtgaacccagataaaaccaaagtcggtagcccgctacggttaaagtttcttggcttttcgttgggtgtagaccacaatggagcctacgcccgtccagctaaacaatcgcaacaacgagtaaagaaagcattgaggttattaactaaacgtaatcgtggaatatccctgacaagaatgtttgaagaaattcagcgaaaaatgcgtggatggcttcagtactactcaattgggaaactaactgactttattcaacgccttgacaagtggttgagggtccgaataagacagtatatctggaagcaatggaagaagcttaaaactaaggtaactaacttacagaagctggggctgtcccagcgtgatgcatatgtcttcgctagtacccgcaagggctactggcgaactgcacacagtaagaccttgagctattctctaactaatagaaaactggaacaactcggacttatgaatatgtccaagacgctccagtcaattcaatgtgattaagttgtcgaaccgccgtatacggaaccgtacgtacggtggtgtgagaggtcgataattgaactaatcaattatctcctactcgattgtttaaattttgattttaaagaaatggtacaaaatggtgcaaatttgtataaccggtgcacggtaagcagtccatattgacacgttattgacagacaaaaaatccccgtagaaccgtccttgatggcttcacggggattttctattcgcaacattcttcttgtacgttttttgaccacggcaaaaaagctgccagatcttgacaattgctctctggtaggtgatcaaacaagtattctaagtaccgctggacgttaagctggtttagtttagctgtctctactaagctatagtagacggcgttcgccttggcaccttcttcggtttttgcgaatagacaattctttcgaattagtgttgatggccgaatactttgctcaactgaattgttgcttaacggtaattgtccatttttttcaaatacatgatacactcgtgattttaactggatggcgttctgaattgccttacgcaactgtccaatcggctggctaatctggctaatgtaattgtaaaatttatccattagcggtttgacatggatttgccgctgcactaacttctcattggccgtttgataactcaactggttttccgaatggaaaacctgactaagaagagttattgcttgttgcgctttggacgccttcattgtttttggcagtgctttgaccaatttgacaaattctcgtcgaatatgcactaagcacgaaccaaattttgcttgcggatagagttgattactataccctttatacccatcgcacatgataatacccggataattattaccgactatttgtccaatgattctaccagaacgcgtattggcgtgatgaaagactacaatcggatgttgggcaaactctttcgttgtccgcgttacccagaaatagtcttgggatttaggactatcaacgactttaaaaggtgtttcatccatatgaatgactggttcttgtctaactgtattgcttaaatactgatacaacggctctaagtacgtttgactaactttaataatattcgaggccatttgcttggcgctaacaggtaatcccaacccttgtacaaagctttcttgccgatggaaaggcaacgccagattaaattttaaataggcgataaatgccataatactgcttgaaaagtaactatgtggtaataaagccattggtgccttactagttaccaatttatcatttccatcttgactacagtgtttacacttatagctttcctcatataagttggcacaatacaattcaggctcttttagtctagcttcccgtcgtgctaacctctttccaatgtgagccattttgtgctgacaatctggacaggtggtcgtttttaaagaaacaacttcctcgacttgaggaagttggtctaaaaactcttgacgagttagctgtttcttcgctggtcgatgacgtacgatcttagtcgttgttgttttaactacttcagtaatctcttgatccaagttcagatcatcaactggatcaaacagtgataattgtccatcagctacctgctctaaaacttcagttttttttccaaaaattatttcctgcagttgcttaattgtaattgcttgttgttcaagttgttcttgagctttcttcaactgcgcacgtagtgcttcgttttctttctttaatgactcagccattgtacgtcacctccaatctaataaacttttgttattatatcagagctaaaacagtttaaaaagagcttagtatagatttcctggtttgattgtatgaatacgtcgctcgggaaatggggatagacctgtaaataaggcatttagttgctctggttttagttctttaacttcacttttgttcttaggccatcttaaactaccattttcatatcttttatatagcagaatgaaaccttcatcatcccaataaagggctttgaaccgatcattgcgactaccacaaaataaaaagagcgaattattatataaatccaatccaaagttttccgcaactaccatcgctaaaccgtcaattcctttacggagatctgtcttaccacaaacaaggtaaacatgctccggtgcctaccaattaatgagcataacgaataaccactttagctatatcagtcgcaagactgggattagctcccttaaagatcgttaattcaatgttatcagcttgtagttttgcggcgggtcgaggaataaattcttccttattaactactgaattcttggtcttaaaaattggtgctacaatatcgtgttttccttccatagaaaaagcctcctgtactaagattgcttttagtataggagactaagtttttgatggctagacgtgtggatacggactgcttacagactatcatcagtaaggagatttttaatttatggcagaacaaaatgaaattatcaccccagttttcaaaaatagaccacttaattttaagaggtatgttttgctgtaaaaacatacatgcgaaagagcaagatttcattgaagcttaattaaaattaaagctagtctcttttttcttgtctggtaagttttttctaggtactattacatagatggagggatttttaaatgattaaagttcgtcaaatatctacaaattcaaatgatttcaaaaatatcaagcgggtttataataccgtatttccacaaaatgaacttttaccattatctttacttaaaatgcgtgctaaagcaggaaaagcagaattttgtagcatttataatgaagagggaaaatgggttggctttttctacacagtctacaacaagcgcatcgcctatattttctttctggcaattgatcctcactatcatggacagggcttgggtagtgcgacgctaaccgcgatcaaagaacggtatgctggaaagcagattacccttagcgctgaacgcccagatcctcaagcacccaataacgaacagcgactcagacggcatcgtttctacgccaaaaatggttttggcaaaacgggtctttataccgttgaaaaggataatgaaaaatttgatcttttaagtatacaatcaagcgtgaatccacaattttaccaacagttaatggatagttatctgactaaccatcgccgccattacttgccgtataaaattgttaaagagtaaaaaaatccccactacctgcatgagtagtgaggatttatttagtttttctgatctttaattttgaatgataagagcagtgccaccacaattaagataattgcaaagtaaatgccgtagtggaaaccattggtaaagcgaatagcttcggatccactaatagaagaactaccccaagccaagcaaccagtagctaaggctgttgcaagcgcaccgataacctgttgcattgtattcatgatggtactgccgtcaccagattctaatccagaaagcgtacttagagcactagtttgtgcaggagacattgctagaggacaaccaatcattaaaatgatatgggcacagattacataaagaagtgcactatgtgatgtagtgaaggccaacatcaaagcgccaaataaagcaaggacaaaaccaattaaaacaggacgtttagccccaatactatcgtaaaggcgacctgcaactgcagaagtggctgcattaataattccaccagggagcattactagtccagtaagggcaacggaaactaagagccctcgttgatagaataacggtaaaagatacatcgtagaaagaataattccaaagtcaagcatcacgattgaagaaccaattgtgaaagccgcatacttaaagatatgaagatttaaaattggttcttccagatgaagttggcgatgggtgtaaaagattaagacaataattccgattattaacgcactgagaactgtaggtgaagtccaaccatcttcactagccaaactagcaccaataacgagccctgaacaacctactgccgattcaataattgagagcacatcaacatgcggcttagtaatttcaccaacattttctaatggagtgatagcaaagatcaaggcaataaataaaaacggaataaataaccagaagatccattgccatgataatttagcaagaattagcccggttaaagtaggaccgattgcaggggcaaacataatcacgagggcacacattcctagaactgctccaatttgtttaggtgggaagatttgcattaccactgcaaacattaatggaagaattaaacctgttccgatcccttgaatcattcgtccaatcaacaaaatagtaaaattatgcgctaaggcagaaatacaagccccaaccatgaagtcaattaatgcaaaaataatgacttggcgggtcgtaaaccatttagtaataatactggacagtggcaagataatcccaataattaacatatatccagtgactaaccattgaattgttgacgtacttacttgaaaagcagccatcaattttggcaatgcaatgtttaatgaagtttcactaaacattccgacaaaagctcctagtagcatactaaccatcatcaatcctggatgcgctacttgcttacgagcttgtaaagcattttccataaatataaaaactccttttatcctaaaaattacacaaggattagtctagcaaatcgtgctatatgctcgtaagttattttttaataactaataatcttaagtatattgattaagattattaagttaggtttagcgttttcaaattcaagcttttcgggataaaaaattctatttagtgataataggaatttaaaaataaatgatttaaaaggtctcacaataatctcaaaatagcgtcgttgcttgtatcctcattttattcctggtagatcagaatagaatataaacagaatatttaaataaataatttgaccacaacatatagtgtttcgaatgtcaatacttcctataagttgtattttgagctatgatagataacgttaattacgagaggggaaataaaaatgaaagtgcaaataattgataagaaggatcttcaaagtttaacaagtgttcaagtagttaaacgtgatggaacagtaacaccattctattcctataagattaaccttattttaaatgcgctcaatgctgatgagcagactagccaaagtgtttatgttaccttattagatgccttgcttaatcaaacaactgtcactactaaaaagattgccgatctctttgttcaaggactggttaatgctaatcatgaagaattggcaaaagtttaccgtgattatcgccaacatgatgaagaagcatttgccgaagctactaatccccaaaataagttagagcagcttttcgaccgaaactcacggattgttcacgaaaatgctaataaagatagccatgtttttaatactcaacgggaccttgaagccggagtcgtgagccgtgcattggggttacggatgcttcctggtattgtagctaaggcgcatcttcgtggtgatattcactggcatgaccttgactattcaccggtaacacctgaaactaactgttgtttaattgactttgatgagatgtttaagcatggatttaagattggtaatgcttgggtttcttcaccacgctcgattcaaacagcaaccgcgcagatgtcgcagattattgctaacgtggcgtctctgcaatatgggggatgttctgctaatcggattgatcaattattagaaccatatgcaaagctaaattacgaaaagcatatgaaggatgccgaagagtggatagtaccagagaaacgagaagaatttgctcgtaaaaagacaaaaaaggatatttacgatgcaatgcaggctttagaatatgagattaataccctttattctagccaaggtcaaactccatttacgaccattaactttggcttagggacaagctggattgcccgggagatccaaaaagccattttgaagatccggattaagggtcttggtaaggaacatcgtacagctatttttcctaaattaacttttactattaaacgaggcttaaatcttgaccctaaagatcctaattatgatattaagcaactagcgcttgaatgttcaacaaagcggatgtatccagatcttttgatgtatgacaagattaaggaactaacggggagctttaagacaccaatgggttgccgttcgttcttacagggatggacagatccagaaactggtaaagaagtaaactcgggacggatgaatttaggggtagtgacagtcaacttgccacggattgccttggaggctcatggcgataagcaattattctgggaaatttttcaagagaagatgaatatttgtaagattgccttggattaccggattaagcgtactaaagaagccaagccagaaaatgctccccttctttatatgtatggtgcatttggtaaacggctaaagaagactgatagtgtcgatgaagtctttaagaatagtcgggcgaccgtttcactaggttatattggtttatatgaagtatgtacgactttctatgggtcaaattgggagcataataaagaagcacatgactttgcaattgcaattactaaggcaatgcatgatttatgcgctgaatgggaaaaagaagaaggatatcactttagtctttattccacccctgctgaatcgttaacagatacattctgccaagatgatttgaagaagtttggtcgggttgaagatgtaacggataaggaatactacacaaatagtttccactatgatgttcgtaaacatccgacaccatttgaaaagctatcatttgaagaggcttttcctaagtatgcggctggtggttttattcattattgcgaatatcccaacttacgccaaaatccaaaagctttagaagcagtttgggactgggcatatgatcatgtcggttatctgggaacaaatacttcaattgatcagtgctttaagtgtggcttcaaaggtgaatttgaagcaactgctcgcggctttaagtgtccgcagtgcgggaaccatgacccagcaacctgtgacgttgttaagcggacatgtggttatcttggtaaccctcagcagcggccaatggttcatggacggcatgaggaaattattcaccgagttaaacatatgaatgctggaatgatcaagaatgcagctgaatttgaacaacagcggcaaatggataataaggctcatgctcatattattggtgatcaaatttaattaattatcaaaaggccagttgcccgtaaagctaccggccttttattatataggaggaaaaagaaatggcagaaacacgattaccccgcaatcctaagttgcaagagtggttagcaaaagatcattcattacaatatattgcagactataagcccttcaattttgttgacggggaaggggtccggtgtagtttatatgttagtggatgcctttttaactgccccgaatgctataacaaggcggcgcagaattttcattatggacagccatatacccaggatttagaagaccagattatcgaagacctttcgcagagttatgttcaaggattgactttattgggtggcgaaccattccttaatactcaggtttgtctgaagttagttaaacgggttcggaaagaattcggtcacgaaaaggatatttggtcttggtctggttatacttgggaagaattaatgaaggagtcgagcgataaacttgaacttctacactacctcgatattctagtcgatggtcgattcttgctggctaaaaaggatcttacccttcagtttagagggagttctaaccaacgaattattgatgttccgcaatcccttcaaacggggaaagtggttatttgggataagcttgttcattagaggagaaaatgatggcaaaaatttggaagaaagagccagcatggttagagaaaaaacgtcaactagcagttatactgcaatcacggtttccgactttacctggtcaagaagaatggatagatcactggcaaaagagaacaactggtgtaagtaggggttggctttctttacaggaagatagcctaactgcgatgcctcttgaacaagcggttaatgaatactcaacactattacaagaaaatttaatggagaaggccatcttttggcaggataaccagttagcggccatgcatcttgcaaatattgactgtggacagtttatatatttgcgtccacaaattactcaggagcgtccaattgtctttagtccccatcttaactctgcaaacacccataatattattgtcatcagtgcggaggtgaatgcggtaattgaagaacggatggttaatgatacgttattaccatcatatgaaggaacggagattttagttggagctaacgcgcacgttacgtaccggcaggcaaatcgctcaactagtaaaaatatctatcggacaatccatgcataccaagcccatggttcaacgctgcagtttgaagtagcgagtcaagttcaaactaaagctactgtcgatctttatagttttctggatggtcaaaatactcagtggacccccacaattgctttaagcggaacgcagcagttaaccgcaatggttgatggttttggtaaggaaacttctgccactcttacccaatatcgggattcagaaatggtcactggagcaccttttaaagtaaaagccggcgaaccactcccaattagcgaagatatccatccattaaaagaattagctagtagtgagcgttggctaaaacaaataatgactgctgaatagggctaaagttaattacagcaatgttacaattaaacattaataacgaaaaataagtcgttgaaattcttctttataagaaaaattcagcgacttatttattattatgttacaaattttggctaattctggggaaaagttagccaaacctaagttactatcaggacgtggccgaggttgatttgcttgacagactattaaaatttttattacaaagtattacgaaaatcaactgaattgatatttcggagtaatccgcatgtaattttggggagtatagtaataggtgttgagagatatgaggactcaacaacttaaactaaattaaactaataaataactaattaataaaaaagtattttatgaaaaggatgggatttttctttatgaagttaactaaaaacatcgcgaaaatcactgctgccgttgcaggtgctgttgccttgggaacattcgctactgcaactactgctaatgctgattctgtttacacggtgcaaagtggtgataccttatcaagtatttcctataagttaggccatgacttaacttatgttgactctttagcttcaactaatcaaattgccaataagaacttaatttatgttggtcaaaagttagtaattaaagatgacggtgaagtaacccaagcaactgctcaacaagctgctactttacctgaagcatctcaagctccagcatcagctagtgttgaaagtcaacaacctagccaagctccggtggttgctagtcaggctcctgtagcaacaagccaagtacaatcatcagctgcaccggtttctgctcctgctcaatcacaggctccagtacaatcagtatctccacaacaatcaactgtttcagctgctgcacaacaaagctacagtgcaccagtacaagcacaagctactagttcaaactacagctcaaatgttagtggtaatgatgcggctgctaaggcttggatcgcagctcgtgaatctggtggtagctacagtgctcgtaacggtcaatacgttggtaagtaccaattatcagcatcatacttaaatggtgactactcagaagctaaccaagaacgagtagctgatcaatacgtagctaaccgttacggttcatggagtgctgctcaatcattctggcaatcacacggttggtactaaaatttaataattaattgttaaagtaggaaattgtctcaataaggggatggtttcctattttttgtaaaatgaaaaaaagttaatattattttcatcctaatcttaaaaaatatattataatagagttattcaagtgatgaaaggatgagatccatgtcaaaagagagtaagattattgatacaaaatcattatatgtaaatcctgaccgcggtgttgcaacgttaaactatagtcaaaattactttactgatattacttcattaattaatagtgatgaagtaaaggaaattgtccgtttatatttagcttcacgtaaccctgataatgatgatgatgcttttgataatgccactgttaacaagtttgttgatatcttaaagaaagttctttttgaggatgatagtgcatttgatgaatatgaccctaaagatattcttgagagtgttgaagaattatactcatactatcgttcactattacgggtatcggtaattaatcttagtgataataagattatcggtaacgagttccggactattgatacccaattcaacgacttagtgcgtaaagcataccggatcctcgaagaaaagctccaaggttttgaaaaccggacttatcgacaagttaatgcggcaactaacgcaacaattttagttcaacaacaagattggaaaattccagctggttatgaagaattaaaggatattgattttattaataccgtgatgcttcgtccaccaatgatgatgcatactaagagtaacaaacgggaaggggtcttttctgaagtaaaagataacccaatcgaacgttttcgtggtgaacgtggtaagtggtattgttacccagcaaagattggtgaaagtttagcctttatttacttcaatgttgattacttggtaaacggaatcgctctttcaaacttatttgaaattgcatcccctgatgagattaaggggcaaaaacctgatatgattcttcttttcggtctaaaagaaacagaaggcatggtttctcattactatcgtgacgaaaagaatgatttgtgggttggtgaagtaccttacacagataagactacttactttggttacatgaagaagatgtgcttgacgctccataaccttcatcaaatttacaatggtcgcctgccaattcacgggtccatgttgaagattaaatttactaatggtaaagaaaagaatgttgttttcttcggtgattcaggtgccggaaagtcagaatcaattgaagcattacaagaattagctgacgataagattgtcagcatggagacaatctttgatgacatgggaagctttacccttactgatggtgaaccaggggtatatgctcaaggaacagaaactggtgcctttgttcgtcttgatgatttgagtagtgccgtggccttcaataacatggaccgtggtgtttaccttaatcctgaacagaagaatgcccgggttattattcctgctgatacttacgaaaatgtaatcaaacatcaccatattgatatgtggctatacgctaacaattacagtgatgaagttggtattcatcgttttgatacagaggaagaggccgaaaaagtatttattgctggacaacggaaggcccttggaacaactgatgaagttggaatgagcaagacattctttgctaacccatttggcccagttcaagaaccagaattaactaagccgattattgacaaggtctttacaaagctatttgaccaagatgtatacgttggagaaatctttactcaccttggtaatgacaagtcaaaggatgctttgaaagaatcagctcaagaattgcttgatgttttgatgaataattaagattacgattaagacaattttgtcatcgccctgtaacaaacagtccgttacagggcgatttttgtgtcgtcaagaaaaaatgagcagtttttttgaataatttttacatgagataattctagttataattttacaagttacttaaaagcgattaaatcaacgtttaagcgactataaaaaaatcagcgaacgtttgttacaaaaaattacagaaataacgaaatttgataagtcctagtaacccgctcgtaaccctaatcctgtatagtagttatcgttgaaatgagttatttgattaattaagagaaaaggacggattgaatttataatgaagttatctaagaaagtagccaagattacagcagcgattactggtgcagttgcattaggaacagtagctactgcaacgactgcaaacgccgacagtatttacacggtgcaagcaggtgacaccctttctgggatttcttacaaattaggtcacgatctaacttttgtagatacattagcaaacaacaataatattgttgataagaacttgatttacgttggtcaacaattagtgatcaaggatgatggtgaagttgcaccagctactcaagaagaagttgctactttaccagccgcaaatgttgcaccacaagctacacctgctgaaaatcaagcacaacaaaaccaacaagtacaatcaaaccaagaagcaccagttgctcaacaacaagtacaaactccacaaacacaaaatgtacaacaatctagtgctcaagcatcaactggctataactcaaatgtagttggaaatgatgctgctgctaaggcttggatcgcagctcgcgaatcaggtggtagctacagtgcacggaatggtcaatatattggtaagtaccaattgtcagcatcatacttaaatggtgactactcagaagctaaccaagaacgagtagctgatcaatatgtagctaaccgttacggttcatggagtgctgctcaatcattctggcaatcacacggttggtactaaaacaagatttaataaaatagataatcaacaaatttcaaacatacgataaaagaggttagaaaaattttagtttttctaacctcttttcgtttaactattataaaatttagctcgtttttcttatacttcaacattagcaacaagttcaattggacagtgacttgaacctttgacatctgaaagaatcttggcttcttcaattcgttctttccatacatcagaaactaagaagtagttgagacgccaacctacatttcgttcccgtgcgtcataacgataattccaccaggtatatgcaccatgcaaattagggtggagataacggaaagtatccgtcaagccagcattaagtaatttaccaaaatcagctcgttcttgttttgtaaagccggcttcatgatgatcttctgttggctctgctaggtcaattggttgataggcaacgctcatatcaccgccaatgattactggcttactactttgcaaattagtaacataatcaaggaaagcgcgatcccagtcgagacgataatcaagatgttgcagcttttcacctgaaactgggacgtatacatcaatcaaatagaagtttggatattcgagcgtgattagtcgcccttctttatcaaaaattgaattattcattccgtatataacgttttctggcttatatttagtgaaaatggcggtaccagaataacccttcttttctgcataattccagtattggtaataatcaggaatttgaatcggttcttcgcctttatccaatcgtgtacattgtagacagaagaagtcagcatcttggcgtttaaaatcttcgacaaatccatgattaatggctgacttcaagccattgacactccaagaaataaatttcatgttaatccttctttcaatttaaccaaaccatgtctctgtaataattgtacaaggaatttgatttttcattaagtaataagactctttttgtgatttttgatacaaaaactgttgtagatgttaaataaaaatattcatattatatatacgaaaatatcaactttaagaataaacgatgcaatatattaaggggatcgcctacttatatcgaaagcgtttatataatattatttatatataaagttacgtttatcacaaaattgtcaaagagtcacaacttagaggagggtgtctaatgacttcaaagtatgaaacagagtcgaaaggttacacgatgacaaccgtaatgcaggaagctgcacgatgtttattatgtcatgatgcaccatgttcacaagcttgcccagcacatactaatccagcaaaatttattcgaagtgttctttttcgtaatgttaaaggggcagctgaaacgattcgggaaaacaatgcgttaggatcaatctgtgcgcgtgtttgtccaactgagcgttactgtgaaaaggcatgtacccgggctaaaatcgacggaccaattgatatcggtgggattcaacggtatgtcactgatatggagcgaaagatgaatatgaagattcttaaagctggtaagccaaacggaatgagtattgccatcattggtagtggcccatcaggtttacaggcagccacgactcttcgtgaaaagggctatgcagttgatatctatgaaaaagctgctaaggctggcggttacttgacctacggcattcctgagtatcggttgccggaagaaattgtggattatgaagttcaacgaattgtcgaccttggtgcgcacattatctataacacaactgtcggaaaagatatttcaatggatgaccttaaagctcgttacaatgcagtaattgttgctattgggacaagtgaagcaaagatgcttccaatgtttgaacacaatatctgtactgaatcagcaatctcattcctagcccgggcaaaaaaaagtaagggtaatttagaagatcttccgcaaaatgtccttgttattggtggtggggatgttgcaatggatgttgtaacaaccttaaagaagcttaatgttccttatgttaccgatgttgtttatgagcagtttgatgaattcaaagcttctaaaaaggaacttgccggtgctcaagaagctggtgtaacaattgttgatggttacgttccaaaagaagttcatcagaatcgtgctacctttactcaccggaagattaagagtgaattaactattactgctgataagattattttagcagttggtcaaaaagcgaatgcagaaggactagacattgacttacagcataatgaaattccattccgtgaaccacgattccggacaaaagatcccaaagtttttgcgactggtgatattgttgccggagataaaaccgttgtggtagcagtacagaaaggaaaagaagtagcagaagaaatagaccggttgttaggaggacaagaaaatgattaaaaaagatttatctgtagactttttaggcgttcattttgaaaatccattttgcttgtcgtcctcacctgttgggaactgttacgaaatgtgtaagaatgcatatgacgctggttggggcggtatcgtatataagactttatcaccaacacactttaagattgatgaagtttctcctcggttcgacgaattagccaaggaagacatgcattttgttgcctttaagaatatggaacaattatcagaacaccccttggagcaggacttggctgatatgcgacggttaaaagaggaatatcccaataaagtcttgattgcttcaattatgggtgagacattggaagattggaccaacctggctaagttagtaactgaggcaggggctgatatgattgaattaaacttctcttgtccacagatgacttctcataccatgggttcagatgtgggaactaatccagaattatgtaagaagaattgtgaagccgttaaacgcgggactagccttccagttcttgcgaagatgacaccaaatattacgacgatggttccgattgttaaggcatgtctagaaggaggggcagatggcttctccgcaatcaatactgttaaatcaattgttgatgttgatctgaagaagaaagttggtttaccaaatattgatggtaaatcttctgtttctggattatctgggaaagctgttaagccaattgctttacgtttcttacaacaattacggtcagcagccggccttgaacaactaccgatttctggaattgggggaattgaaacctgggaagatgctgctgaatttattcttttgggtgccactactctccaagttacaactgcgatcatggaatatggttatcggatcattgatgaccttactaatggtttaatgcattacatggaagaacagcatgtagaccaccttcaagatcttgtcggcttagctaataagaatattattcctactaatcagcttgaccgaaattacaaggtttaccctaagattgattgggataagtgtatcggttgtggacgttgctttatctcatgtcaagatggtgctcaccaagcattaacttgggatgatgaaaaacggcaaccagtttttgataagagtaagtgtgtcggttgtcaactgtgtgcacttgtttgtcctgtgggggctattaagttaggccttgttgagattaagccgggccacaaaggtaatccagcagaaatcgatgtaggatctcaacgtcttcatcgctatcacccggtaaaggctaatcaagaaaattaattattagttttcctcatatatgaaaaatcgaactgcaactttgtgaaatgcaaaattgtagttcgatttttagctttattatgtcacattgtaactcttaaattactgcgaggggtacttttttatttggtgatgggaactctttttgtaaagcaagtaactcatcatcacttagttcaatgttaccagctgcaacattttcttcagcatgttttgggctgctgctctttggaatagcaaggatatttccaattcttaagacccatgcaagcatgatctgactaacggtcatatggtggtttgcggcaatttcttttagtagcggattctcggttaactttccagatagactgtcaccctgtgcaaggggagagtaggctattaatggaagctgatgctgtttcattaagggaaggaggtcaaattcaattccgcgactatcgagattatagagatcttcgttggcaacgcaatcagtgccatttttaaggcgccataattcttcaagatcactgacgtcgaagtttgagactccccatgctttaatctttcctgcctttttaactctctctaattcgttgactgtttctgctaacggaatcccaccccgccagtgtaaaaggtaaaggtcaaaatagtctgttcctacggcagctaaactttggtctaaactatgctcaagttttgtcttgctggcatttgaaggaagaactttatcaattaagaatagcttttcccgactatatggtttgatggcctcagcgacaagtgcttcagaacgaccatcgccatacatttccgcagtatcaatagcttgtgcgccaacgtcaattgcagtttgaatggctttaatttctgtggaccgattgacgagagaatttcccatattccatgttccgattccaattgcgggcattgaaacatcattgattgtgacttttttcatcttgcgcggctcctttctattttcctacttctattatattctttttagtcaatggtccctagcatattagttgcattttagttgaaagcgtttaacatagacaatgaataagaaagaaaggaagcattctttatggctaatgaattacaaaaccgtaataatttattcgatagtttgatgaacatgcgtaactggatgaacgatgatttcttctctaacctaactccggttgctgatcacatgaagacagatgttacagaagatgacaaaaattataccgtaaagattgacatgcctggatttgataagaaggatattcacattaattatgccaatgatattttgacagttactggtcatcgggatatctttgatgatgatggtgataaggatggcaatgttctgcattctgaacgtcggtatggccaaatgagtcggcaatatcgtttaccagatgtaaataagaaggatatcaaagctcaatacaagaatggtgttttgacaattactcttcctaagaaggatgagactgatgacgatgaaaatcatattgatattgaataattaaattaaactgagtaaagagttgtggaaaattactttctgcaaccctttatttttcatccgtttcttgaacatatgtttgattgaagatataatagtatttactgaagtgctggaggtattctcatgatggggcgaacatatatggcaatcgatttaaaatcattctatgcctcggtcgaatgtactgagtgtgggctcgatcccttaaacactaacctcgtagttgccgatgaatcgcgaactagtaagactatttgtctcgccgtctcaccagctttaaaaaagtttggcgtttctggtcgcccgcgattgtatgaggtggaacaacgggtagcgtacttgaataatcgtcgtgccaaagaaatgtctcaccagcgattatcaccagttgtttcaatttaccgggatgaactattaaaatcaccggaacttaaaattggttatagtattgcgcacccacgaatgaatttttatcttgaaaaaagtgccgccatctatgaaatttatttacgctatttaccaccagaaaagatccacgtttattctattgatgaggtaatgatggatattactgattatcttaataagtaccatgttagcgcccgttctttagctaaggaaatcatccaaacaattaaagcagagacacaaattactgcaactgcaggaattgggaccaatcttttcttagcgaaagtagcgatggatatagtagctaaacggattccaggggatgaagacggggtccggattgcacagatgaatgaacatacttttcgtcgttacctttgggcgcaccagccactaacagacttttggcgaattggtcctggatatgcgcgacgactaaaaaagctaggtcttcatacaatgggagatattgctcgttgttctttgggaaagttatctgatccaatgaatgaagaagtattataccgcgaatttggaaaaaatgcggaaatcattattgaccatgcgtggggatatgagtcagccaccattaaagatatcaaaaattatcattcatcagatcatggggtgtattctgggcaggtgttgcctcgaccttataactttacagaaacccggttagtgattcaagagatggttaattcattagctctccagttaaccaagcaaaacttagtaactgatcaagtagctttaagggtcgcctatgatgtttctaatatatcggaggattaccaaggaccattagtgacagacttctatggacgccaggcgccaaagccaatgcatggaaaagctaatctttccttaccgacttcatctggtacagaattgatggaggcatttatgaagttatgtgattctggccttgaccggcgattgacagctcgtaaaattacggtaatagcgaaccaccttctctcaccacggcttgccagattggcgaattataatgagcagttagatttatttacggattcaacgaaaaaacataagaatcgttccaaagttcaagaaaaggatcaaaaactacaaagacttgtccttgatttgcaaaatgagtacggtaaaaacgccattattcgagcggcggatttgaaaaaaggtgctactcttttggaaagaaataatcagattggagggcaccaagcataatggaaaatgaagatttgctgaaaatagaaaaaagcttgtttagtgatacctcaaagtatcgtgatattatcaacacccctcggcatgtttctcaagctcatacgccaatgaccaccgaagatcgcgctgctcagttttctccttttgcggccttgaccggctaccatcaattattagcaaaggtaggggaaaagtatggtcataagacttatcccacagctgagatgaggcatcgaattagagtccaacttgccatgattgaacggggccgatcacatccgttaataaaagttgaattctttaatggtaagactggtttttatgaagaatacacggggcaattaaaacgaattgatcaccatgctcaccacctaatatttgatgacggaacaaggcttataattcaaaatattcgtaaaattaaaagaggtcagcaaaactgatctcttttaatataaggtatacgttaaaatgcttgaataagtttcatgattccgaacacaatcaagaatgttgaaactaaccataccactgtaatagcggaaagtaatgggctaaataaaagaataactcctaataccaaactcaaaattgctagaattacaatgaaccagtagtatccacgatgaaattccttgaaaaacttcgcactgatcaactcagtgatagaatcaaggataaaccagatagcgaagatgatagcaatgaagagtaccccaaagcttggttggaaaagaaaaataattcctaaaatgatatctaaaattgcagaaaaaattaaccaacctgaggattctcctaagattcgaccgattcgttgacggaaccataattcataaattccgcggaaaataaaagtaattccggcaacaatggctaagaagtgaagggttttatctggccgcgtgaatgatgcaattccggcaatgataaataagaccccaacaattaggctaaaccagtcaaagccctttttagtttcttcaaacattgaaaaacctccctaaaaataaaattattaatatcatagttcaaatgggttaataaaacaagaagaaaggaaatctcaacaaggtagtataatacatataggatgaaatagtaaacaacctaagattagttcaggataaaaataattattgtcctggacttttttgttattctgaagatagagctaagatcgatcatgctcccagggacttcgagtccgtattataaaatgatctccgctatctttgatttgatattttgcttttaggttgtggaactacgagttcgagtatttaggaaatgaagtacaaatctaggatagcggttatatctagctctatttatagaaaggaagtttttttatggctgatatatttgccttggatgtttcaatggggaaaagctactgtgtctggtatcgagggaaacactgtttaaaggagttttctttagtacacacgaaagcggggtttaatgctctacgagatatgattaagaaagctcagaagtcaattatctactttgaagcgactggaatttattcgcgagtaattgaacatttctgtgagaccaatggtctccgcttttgccgtcttaatccgctagaacttcatttaaagtccgagagtctacgacgagttaagaccgatcagaaagacgctcaccggattgctctcactgtccaggaaaatacttttcgattaatagttccttggaaaaaagactatcttcagctacatgagcttagtcggttctataatcagctcaatgctgattggaactatcgtctaaatcatcttcatactgcacttgaacaagtttttccagaacttaagcaattatttgtaaatagaacatctaaattagcgttgaatatcgtggagctttttcctcattcagcactagttaggccttattcgagagttaaattaaagaatattctaatggcatctacagataaacgaatatctaagatgaaagcttataagtatgccgatcgattaatcgatctcgcccaaaaatcatatccggctgtttctggtgatgccattcaggttgatgaagttcgctactatgctcgccaattaattgccttaacccgtaaaagggaagaggttatcaagcggatggaatctattgcccagcgcttaccagagtatatcctatactgctcttttccgggaattgggaaacaaactgcggctcagttaatgggagaattgggcgacattagtcgctttgacaatgccaatcagcttaatgcctttgtcggaattgatattcgtcgttaccaatctggaacctatttaggtcaagatcacattaataagcgtggaaacccgattgcccgtaagctcttatattttactgtaggtaatatgatccgccaacaacacgctaattctaatcatatcgttgactattactatcgtttaaaagaaaaacgacctcatccaaaactgaacaaggtcgccatggtagcttgtatgaataaaactctgaaatgtctcttatccatgattaagcaccatgaaaaataccactatcggtatacggactcaatggtccctgtgaaggcataatcacctcacaattttaatataccactaattctcgatttttgaagaagaaccgagttggtttagtatactcttcttttctaaatatttttcttgactaatcgtaggaaagggagcgagacagaagttacttgtgactttgttttttgatgcgaagctagcctctgggagcccccgcaagcaacaataggccttcagcgtccggcaaggtcgaacgctgaaggccattgttatactgcgctgttcgtattttgtggaagtgacctaacttatgtcacagctccttttgtcgtaatttcccgggaaattaaaggtgctctttaataccgttgggaaaatccttatcaatctcctttaagattggtaataatgaattgacatattcatgatatgcttcgattggctttagatcttttgctcgggattgtagtaaggtaagagcaatatcatgcgctctttgttcatttgtaatcatcttttaccacctcagttattcagtttatcagattttccacctactagcataaattgtttaataacttgatgaaaaatcgtttgatcaagtataatcattactgcaaaaccaattgtagttccgatggtattgctaatcaaatcatccacatcggcaacccttccaatatggaaaagaaggtcgcaaacaaattggttacactcgataaataagctgaagaaaaagccgtaaagaatagcacgactgaagggcatttggtgattaattaaataaagataaactcctagtggtaaggtcatcacaatatttaagaaaaattcttggctgagtccttggagggggatgatattaaatggtacgccgtgaaaataaaataaaagtttgttagcagaactaaaattaaacattgaaggggttagacaaagccagtcgatagcagttaaatagataaaaaaggttgcaattgtaatatgctggctgaagttaggaaatttttcccaaaggtgattatgggtaacgaggacagatcctgcaaaaaaataaataaaaaatgggatccagtgaactaatgcgtacaatgtaatttctccttctacgaaaaatggtatacaataggttttcaatgttatatatcatagttgatttttttagtaatgactagtaaacctaactaggattaataaaacttcaattattgagaaagagagaggatcatggcagaaaaacaagaatttacacgtaagcttaaaagccgtcatattcaattaatggcgcttggcggaacgattgggacaggattatttcttggatcggggaaggcaattcacgctgctggtccagcaatccttttagcatatttaattactgggattatttgttttggaattatgcgggccctgggagagttgcttctttccgacttacattatcattcgtttatggatgcgattcgtgattatcttggtaatcgcgtgagttttgtaatgggctgggcttattgggtgtgttggctagcattggcaatggccgaagttaccgccattggcttatattttcaactatggtttcctcaagttccccaatggttacctggattaataactctcctaattttattgggattaaatctaatgactgttagtacgtttggtgaactcgaattttggtttgcccttattaaaattttggcaattgttattttaattgccgttggtgtcattttagttttacttcattttcattcggtaagcggctatctcgctactcctgctaatttagttaatgatgggggcttttttgctaccgggacaaagggcttcatgctttcttttcaaatggttgtatttgcctttgttggaattgaaatggtaggggtgacagcggctgaggcagagaatcctaaagttgttattcctaaggcaattaatggtattcctattcgaattatgctcttttatatcggtgctttggctgtcattatgtgcatttatccgtggagtaaactttcaccaagcaatagtccgtttgtccttgtttttcgcgacatcggtcttccgggggctgctagtatcgttaattttgtagtaattactgctgcggcttctgcttgtaatagttctctatatacaactggtcggatgctagctgagttaacctctactgctcatcggcctgttatccgtaagattagtcgcttatctaagcggtcggtgcctgcaacagcggttattatttctgcagtcgttattggaattgccgctatcttaaacttagtaatgccagaaggagtttttacttttgtttccagtattgctaccacgagttttctctttgtatgggctgctatcatcttggcacatttaaaatatattcgtcagcatccgcaatcaaggacttttaagatgccaggcgcaccttttactgactatgttattttagtttttctttttattgtgctaattgttttatgtatggagaaacaaactttaattgcgcttatactgacattggcttggtttgcaattcttgccgttgcttcattaacacaaaagaaagcataaaaaattccccgagttttcggggaattttttactaacgattcaaatgtaatttacgttgacactcgggacaaatgccatggacttcgatgttatttcctgtaactagatagccagtcttttcatgagtcataaccgttaattctttcgtgattgcagtaaaatgttcatcaaaaacatcagaaatcttaccacaattatcgcagacgacatgataatgcgggtggccgaaataatcaaagtgggtactgccgtctccattttttagctcaattacgagattataatcaacaaagagttttagagtattgtaaacagttgccatactgatattgtcaactgtgtctttaaggtcatcataaatcatttcgacacttggatgagtatgatgattgattaagtaatttaagatagttttccgctggggagtaagacgaaccttgttttcacggagatggtcaagagctcgatcaaattctgcttctgccataatgtcgtcccctttcttaaaataattataatctattgacattataacatttacattcactaattcaaaacatataataattaacggtcagataataactattctaaagaaggagagaatgatatggatcaaagtatcgcacgcaatggaaaaagttatagtcgcttttggtttatttttactttactagttggtacctttacgatgtcgattagtcaatcatcgttgtcaactgcctatccaactttaatgaacgcttttgggatttcagcatcaaccgttcaatggctgacgactggttttatgctcgtaatgtgtgtcagcatgccaattagcccgtggatgctcaataatatgagttttaagacaatgttcattggggcactgggactatttgatattggatccttgatgattgttttaacccccgcgtcttggggaattaatggtttctggtttatgatgattggacgggccatggaagcttttgccgttggagttttattcccatcataccaaactgttttgcttgagattacgcctaaagaagagcggggctcaacgatggggattgctggtttggtaatgggatccgcccttgcctgtggaccgattgtttcaggaattgttctaaagttctttagctggaagagcctttttatcctcttcatgcttgttatttccataattattttaatggctgctagcggactgatccaagatgtaatggaacgccatgaaacgaaccttgattggctatcagtaattttactagttggattaattgggattatgtacgttgttgaccaaaccggaaaaaagaatcttgcatgggaaataaatgcagggatttttatcgttagtcttattgcggttatctggttctgcattcggcagcttcacctcaagcacccgctattggaattacgggtattgaagacttttaattatgatttagcaattcttttaacgtcgatttcatatattgccttaattgtaacgacaattatttttcccctctattatcagggagtattaaaagttagtccatttgtttctggaatggccctagtgcctggagctgtttttcttagtatcctgaatcctttgtcaggaaaattggctgataaaattgggtttaaaccgacaatgctggtgggaatgtttatgattatcattggttgggttgctggattaatcgtccttaatcatctcagcttattgggaatgatcctttgcgcaatggtgattgaaggtggaaatgcctttgtaatgatgccggccgtcacactgggagcaaatgccttacctgatgaattagtacctcacggaacagctgtaattacaacagtccggcaagttctcgggtccgcgggtgttactatttcaacactgatcttaacggttgctactacaaatgcacttcaacggggaagttcggcgcaagtagcttcccttcacggctatcatttagtatttattggcatgatcgtcactgaattgattggtctcgtactagcatttatgctaaaaaatactaatactaataaggaaaaaagtacaaaataaccaaaaattcgtatataaatagggagaagaaaatttctgctccctatttattttgaaaacaaaaaagaggtattgataatgacacttaaacgaccacaatgggcaaatgcgacaccagaaatgcaagactattatgatcactactggggatttccagttcatgatgaccagcagttatttgcaatgctatctttagaattatttcaggctggtttaacttggcagacaatctggcggcgacgggaagcatttaatcaggcattcgataactttaatattgaaaaagtggcatcatttaccgatgaagatattaatcgattatgcgaggatgaaactattattcgtaatcgtcttaaaatattagcggtaattaataatgcacaagtgattttaaaattacggaaaacgggaaagacgtttgataattatgtgtggcgctttgttgatgatcagcctcaagacttggggttaactaccgatattgaattagctcctaaaacgcctgcttcggaagaaatagccaaacaaatgcggaaggatggatttaaatttgttggtccgacaattatttactctttcatgacagcggtggggatggtcaatgcccgtttaaagtaagaatgtaaggattaacattgattgttggttgacaattatgctaagattattctcgttataaagcaattcccgataggattcacgtctgaacgtgaagatgccttgtaaccgcaactacaaactatttgaaagtttcaatagaatatgggggaattagaaaatggcagaacgacatttatttacatccgaatcagtatcagaaggacatccagataagattgctgaccaaatcagtgacgcgatcttagatgaattgcttaagaaggatcctgattcacgggttgcagttgaaacctcagttactactggactagtattagtctttggtgaagtttctactaaggcctacgttaatatccaacagattgtgcgggacacaattcgtaagattggttatacagatggtaagtacggtttcgatgctgataattgtgctgttatcactgcaatcgatgaacaatcaccggacattgcgcaaggggttgatgactccttagaaacgcgtgaaggtgaagctgatccgcttgataagattggtgccggtgaccaaggattgatgtttggttacgctactgacgaaacacctgaatatatgccattaacattggttttaagccataagttaatgcgtaagattgctcaactacgtaaggatggcgttatctcttaccttcgtccggatgcaaaggccgaagtaactgtagaatacgatgagaatgacaagccgttacgtgttgacaccgttgttttaagtacccagcatgatccagaggtttcgcttgatcaaatcaagaaagatattaaagaacaagtcattgaagcggtcattccagctaagtaccttgatgatcaaactaagtacttcattaatccaacaggtcgctttgtaatcggtggaccgcaaggggatgccggcttaacaggacggaagattattgttgatacttatggtggggctgcccatcacggtggtggagccttttctggaaaggatgctactaaggttgaccgttctgctagttatgctgcgcgctatattgctaaaaacattgttgcagcgggctatgctaagaaggccgaaattcaagttgcttatgccattggtgtagcagaaccagtatcgatcatgattaatacttatggtaccggtacccgttcagaagaagaattaattgccgctgttcgaaaagtatttgatttacgtccagctggaattattgaaatgctcgacttgaagcggccaatttacaagcaaactgctgcttatggtcactttggtcgaactgatgtggacttaccatgggaacaccttgataaagttgatgaattaaaagaaattttaggctaataatttagttacacgcttgcaatcattaacggtggttgttaaaataggcgttaaatatttgatcgtaatagaaatagtagtttttgacgagggcagcagagatcctgtggtggtgtgaacaggagactggtcatttacgaactcatctaaatgtgattattactgaatcttagtaggtaatgacgtttaccgcgttaaggtcctaagcgccatggcttccatggaaaacgggtggtaccgcggagttatttcgtctcgtagattgatttctacgggacttttttattacgatcatcaaaatcagaataaggagtagaaaatatggcttacgatcataagacgattgaaaaaaagtggcaaaagttttggaaaaagaatggaacttttaaagcagaccttaataaggatcaaaagaagtactatgcactagacatgttcccatatccatctggtcaaggactccacgttggtcacccagaaggctataccgctacggatgtaatgtcacggatgaagcgaatgcaaggatttaatgtcttacatccaatggggtgggatgcattcggtttaccagctgaacaatatgcattaaagactggccataaccctaagaactttacgaacaaaaatattgatcatttccgtgaccaaatccaatcacttggattctcatatgactgggatcgtgaagtaaatacaactgatcctaagttctacaagtggactcaatggatttttgaacagctctacaagaaggggcttgcttacgaaagtgaaattatggttaactgggcccctgattttatgggtggaacagttgttgccaacgaagaggttgaagatggcaagactaaacgtggtggctaccccgtttaccgtaagccaatgcgtcaatgggttttaaagattactgcttatgcggaccgtttgattgatgaccttgaccttgttgactggccagaaagcgttaaagaaatgcaacgtaactggatcggtcgttcagaaggtgcttcagtatttttcccagttgtgggggatgaagatactaagattgaagtatttacgacgcgggcagatacgctctttggtgcttcttatgttgttcttgctcccgagcaagaattagttgaccaattgacaacaccagaacacaaggcggaagttgaaaagtacaaggaagaagcgtcacggcggtctgatcttgagcggactgacttaaacaaggacaagactggtgtatttactggttcttacgttattaatccagttaacggtgaaaaactaccaatttggattagtgattacgtgcttgcttcatatggaactggagcagtaatggctgttccttccggagatcaacgtgattatgactttgctactaagtttgacttgccaatcaagcctgttattgaaggaacagatgtgtcagaaggtgcttttgatggtgacggtaagcacattaattctggtttccttgatggcttgaacattgctgatgcaaagcaaaagatgatcgattggcttgaagaacacgatgctggtcataagaaagttaactaccgtcttcgtgattggatcttcagtcggcaacgttactggggtgaaccaattccagttatccactgggatgatgggacaacctcattagttccagaagatgaacttccacttgaattaccaaagactgataacatcgaaccatcaggaactggtgaaagtccattagcaaatgttgaagattgggttaacgtttatgacgaaaatggtcgtcatggtcttcgtgagactaacaccatgccacaatgggccggttcatcatggtactggctccggtacactgatcctcataatgacaaggaatttgcctcaaaagaagctcttgattactggtcaccagttgatctctatgttggtggagctgaacacgctgttcttcacttgctctatgctcgattctggcataaggttctttatgacctcggtctcgtaccaactaaagaaccattcatgaagcttgttaaccaggggatgattcttggttcaaaccatgaaaagatgtcgaagtccaaaggtaatgttgttaaccctgatgacattgttgaccaatatggggctgatactttacgtctttacgaaatgttcatgggaccacttgaagaatcggtaccttgggatgaaaaaggacttcatggtgctaataagtgggttcaacgtgtatggcggttgttgatggatgataataaccacctccgtgaccgggtatccactttcaatgatggtaagcttaccaaggtttacaatcaaactgttaagaaggttaccgaagactacgaacggatgcacttcaacacggctatttctcaattgatggtctttgtaaacgaagcctacaaggttgatgatttaccagttgaatacatgaaaggctttgtaaagatgattgcaccaatcatgcctcacatggctgaagaactctggagtcaattcggtgagagtgatacaatcacttaccaatcatggccaacttacgatccaaaagctttagttgaagatgaagttgaaatgatcgtccaggttaacggtaaggtacgggctaagattaagatggccaaggatactgaccgcgatgaagcacaacaacttgctttagcaaacgaacatgttaagaagtttactgacggcaaggatattaagaaagtcattgttgtccctaacaagatcgttaacattgttgcaaaatagtaaattaagaaagggcagggaatttatgttttcctgcttctttttatttgaggagcagataagttatggaaatagtgagttatccagcaatttttaccccgaaagataatgaaattcaagttgattttccagatttgccggaagcatttacccaggggaaaacaatggatgaggcgatgaattttgctaaattgggcttagcgattacccttaatgataaacttggccactttgaagatgccccagctgtaagttcattagaggcgttaaagcaacaacatccagatcaaatcattaaaatggtaactgttgatttggaacaatactagattaaagaaatattaaaaacggtaaatcgaattgcaccaactttttattcacgataaaatgaaaactcgattaaaataaaaaaggtaggattgcaacaaatcatggaagaaaataaagtaaatgatttgagcagcaccgcagtcaaaaaagattcgcaaacaaaaatgattacaggatcagcttggatgacagctggtagtattacttcgcgaatcttaggggcgctgtacattattccgtgggttacatggttaggagcttatagtaacgaagcgaatgccttatatgctcaggggtacaatatttataatatgtttttagtgattgcaacggcgggaattccttctgcaatttctaaaatggtcgcgcattataacggaataaaccagtatggcgttagtcgccgactgtatcattctggaatgtacgttgcaatggcaatgggtgtaatttgtacgacagtgatgatgtttggagctcgtttaatggataatggagatccaaatatgattccggttatccgctcattggcttgggctattttgattattccggggatgtcaattacccgaggctttttacaagggtataattggatggcaccatcagcaatttcacaatttgttgaacagcttttccgggttatttatatgttggcggccacttatttaattatgaagattcaaaatggtaattgggttagtgccgtttctcaatcaacatttgcagcctttattggggcaattggtgcagtgatcgtcttagggattgcctggatgcgtcaccaacgcgaaatgaatgacttagtggcacaaggtgaagtaaacactgaagtttcaacccaaacattaatttttaagattatttatcaatcaatcccgttcatcattattgaatcaggggtaacgatttttcaattaattgatcaatatacttttaagcggatgatgccattagttggtcactttactaagtaccagatggatgttacttatgccttattcgcgtttaatgccaataagctttacatgattgttatttcattagcttctgcattagccgcaacagttattccgttgcttgcgacagcccgggctcagaacgatcaagaggatatgcgaaaacagattcaaaatgttctcttgttattctattttgtgatgatcccggctgctcttggattatccgcggttgctcagcaaatctacaccgtcttttaccgttatgatgcggcaggggtcgtagtactgcaatttgcggcatacatttcgatcatgttgggcttgtatactgtagccgcagcaatgatgcagggaatttctgagaataagaagatgatgatgtttttagccatcggaattgtaattaaatttatcctccagttcccatgtatttggatctttgaaggattaggaccactggtttcaaccgggatttcaatgtttgtgattaactatttgatcttgcattcctttaatatggaattccacctacgttttgataagatggccctgccaactaaccagattttggcttactccttagtgatgtttgctgggacaaagattgtaatgttaatcattggtcattttattagtccgtatgggcgttacactgctttcttctccttgattccgggggtaatagtcggagcaggaatttatctctatctctgcttaaagtcacgattagccgaccagctcttgggaccacgagtagcaagattacgaacaattttacacattaaataacaatgcatacaaaaaggttcagagtgagaatttgctctgaacctttttaatatccttaaattcttaattcaaaaatccaatatggtgatcttcattcatcccatctatctttttcatgaaggctgggagagcacggctaatttggtggggaaggacgatgtattggctttcggcgatcttttccgcaatcgcactgtgcgcataaacggcagcgaggacggctttatctgccttctcgttaaattcagcagtgaaacctccaaccattccagcaagagtatcacccattccaccaactgcttgggcgggggtaccgattggcaattgatatacttggtcatcagtataaatttctgtgtggtgcttctttaagacaacggtagcactaagtttttcttgggcttccttgttcttatcttcagtttgatcgccaattttaattccagagagtcgttgccattccatttcatgtggagtgtaaatgatatttccttgtggctgttcaagcttttccatcgccatcagggtaattgccgacccatcaatgatcacattttgtttctcggttgtatgagcaaaaacattcttcaaaattcgtaaacttgtttcatcatttccgaggcctggcccaacgaccacactggtagcagctttagtaaggtcagcaactagggcatcatcagtaaaatcagcgaacatcgcttctggcaactgcgcatggagggcactagcgttgatttcatcagttgcagttgttacaagcccagctccagcacagacggctgcggttgatgccatgataattgcgccaccaaaattacgattgccgccgataagggtaactttcccaaaagtacctttaaaactgttttcaggacggggagtaataacatcctttaagatttggtcagtaagttttttcacagttaagactccttattattttatttaatagacaatttaatggtatcattaaaattagtcaaagtagaatattttggagggattaatcttgactgattggatgaaagccgcagaggcgcaaaaagaaaattatttaaatgatctcgtagcattaatgaagatccccagtgtccgtgatgattcagcggcaacagatgaatacccgcttggtcctcgtcctgctcaagcgctaaaagcatttttagagatggcagaacaagacggttttaaagtaaagaacatcgataaccttgttggatatgctgaatggggtgaaggtgatgagacacttgccattttagcccatcttgatgtaatgcctgctggtaagggttgggatacggatccatttgacccagttatcaaggatggcaacttatatggtcgtggtgcttctgatgataagggacctggaatggctgcttactatgccttgaagtatttgaaagatcaaggcgtaaagtttaacaagaaagttcgttttatcgttggaactgatgaagaaagtaactggactggaatgcaccgttactttgaagtcgaaccagcccccacacttggtttttcaccagatgcggaatttccagtaattaatggtgaaaaaggtcaagtatcactcttacttgatgtccctgctggcaatggggatgcttcaacacaactagttagttttgaatctggtttgcgtttcaacatggtaccgcgggaagcagttgcccttattcggacagataatcctcaagaagttacgaatgattttggtcactttattgaagaaaatccggttgaaggtaatattgaatcaacagataaaggtcttaagattactgtcatcggaaaagctgcccatggaatggaaccagaaaagggaatcaatgcagcaacataccttgcaaagttcttaaatcgatatgactttggtgggggcgcaaagaatttcattgaattcttagctgactatcttcatttagatacgcgaatggatggttttaatggtgcttacactgatccagtaatgggcgaattaactatgaatgctggaatcttaaacttcgatgcggacaagggtggtcacattgatatgaacttccgcttccctaaaggcatgacaccagataagttagaggatactgtaaaggcgattgccgataaattacaaattaaagttacgcaaggcccatctcaagctccacattatgttgatccagatgatccaattgttaagacattaatgcaagcttatattgatcaaactggagatacagacgcaaaaccagaagttgttggtggaggaacttatggtcgtttgatgaagcggggggttgcatttggtgctttaatgccacatacgccaaatacaatgcatcaggctaatgaatatcaacctgtgaatgatttaattacatcgatggcaatttacatggaagcaattaataatctcgttactgattaattttgtgctaaaataaaggcagaagatggaggtgtcaagaatgagttatcaaaatattcttgttggtgtcgatggttccaagcaagctgatatggcttttgaaaaagcggttgacactgctaagaccaatgatgccaagttgtatttactaagtattatcaacggtgaacgttatccaagtactggtcctggtggatacggctttgttagtcatagtatttatgattcagcaatcgaaacgatgcaaaagaagttagctgactacaagaaaaagcagaagccgctggaataaaagatgttaaaactgatgtaaaggttggtaacgctaaggttgaacttgcggaacgttatcctaaagaaaatgatattgatttaatcattattggcgcaaccggattaaatgttgtcggacggctacttgtcggttcaactgctgcttatactattcgtgaagcaccatgtgacgttaccgttgttaagacaaacttaaagaatcaaaaattggatatcaaggaaacgacatatcctgaaatgtaaaacataaagactagtggaattttcttctagtcttttttagttttaaaaatgcaaattcataattttcgcgtatatatactataggacattatgaaggagtgttttattgtgttaaaccgccgtgttattactagtgcattaattgttttaacaagccttagcgggcaaccggttaaagcggacgttatccaacaagcacaatttgatgcaaatgaagatgtaaaacgtgcaaagccgattgacgaagaggccttagttaatcatgatgaagaatatattgatgcttatttaacagaatatgaaaatgctgctcaagcaaaggcaagtgagcaaaataatgctttgacaggtacagaggaagcgccagagcatgaaactattcaatcttcaactgaaaactctgctgaacaaaggcagctgctagaagaagataaaaaagatgagcaggtttatcaacctcaacaaccatccgcagtccaagcacaatttattaatcgaatagcctcagctgctcaacaaattggtcgggagcatgatttatatccatcaattattattgcgcaagcggccttagagagtgattggggatgcagtacgttggggaaggcgcctaataataatctttttggggttaaggggtattttgcccggcaaacagttgctcaacccacgactgaatatgataagcaaggccataagtttcaggttattagtaattttcgacagtatgcaagtgaatacgaagcgttaagggattatgcgcaaacattagaagacccactttatcaaggagttcaccgtcaaaataccaaaaattatcgtgaagctacacgggcacttcgcggacgatatgcaacagatcccgagtatgatcggaagctaaaccagctgattgatacttaccaacttactaaatatgataatcaagttaacaccagcaatgaacgggctaatcctgttccaatgactgacaggaaagaggagagtgaggcgatgccaattgttgccaaacatcccgttcaagcgagaaagaacgatgttaatatccctcaatatgttcctttgctcggtggggtagggacggcaggaatgattgaaatgtttcgtcgtttgttgaagaaaaggaaagagcatgattaaaaggcaaacctctaatcatgctcttatcaattatttagcgtaatgacttcaaccgttcatcaatcattgctaagaccgcatcaacgttcttaggatcttcaaggtcataacgctctaaatcaattttcatttttggactagcatcgtaatccttgtaccattgcttgtaggcactccacatcttgtaatagtaatcctttaactctggattagtatcaatttgctcgtaatctcgcccgcgctttttaatccggtataagattgtttcaaaatcagtttcagaataaaccattaagtctggtgcgcgcttaggtaactgttggaggtcactcatcatattgtcgagaagctttaagtatacttctaattcagtatcagtgatgttaccctcggcgttattttctcgcgtaaacaaggcatcttcgtaaatggaacggtcaagcacgttgttatcatcagtaagtgcttgtttaatcattgagaaacgcttgtttaaaaaataaatttggagtaaaaagccgtactgttttggatttttataatacagtggtaaaactggattttctccgactggttcaaaaaatgcttttgtatgtaagtgttcggcaatcttcccagttaaagttgttttaccgacaccaatcatccctgctgtaataatcaccataatggcccctctttacttttttgtcacaaaaaatatcttactacaaaatattgtggaatgacacacctaattttacaatatttggtggttaccagatttaacttatcgtggtaaaagttatcacatctacattgttagcgattataataaaagtagagatatgattaaattttaaaaatctaatcatgtgaaaaattaatattaaggaagtaaagatgagaaaagaaagtgaaagtgagaatcgcgttcaattaacaatggccaagcagcaaggaacattgattgaggttcataacttgccaaatgatgattattttaatgtcggatttgtcgttgctctcgatccagtattttgtttgatgatcagtattgactgggatggtaaaatcaacggcttaattgctattcggattaagagtattctttatacagaacgccatagtgactacttaatgacggtttctgaaaaaactaaagttgcccatgatcacaactattttgatatttggcaagtacaaaattttattgataaccatccagaaattacccaggggaacctattatcaaatcttatcaatgattcctatgagaaccgtcttccagttgtgattggcactgaaaagtataagggaagtgatgattttacaggaataattactgatctcacacccattaaagtaacaattcattactataatgaccatgacctgtcatcattgtgggaatatgatattttgcgagcaaagattgactatctccgtgttcgtggtactcagatggcaaccgggaaacagatttttaatgatatttttaacgaaatgtgattgcaatatgagttgagatagtttaaattaattaaatattattaactagataaaactgtttactaaagaggttgaacagccatgaaaaagaaaataacaattcgtgatttagcaaaagaagctggtgtttctgtaaccactgtttcgcaaattttaaataataaaggcgatcgattcagcacagcaactcaggaacgagttttagcattacgggacaaatataagtacgttcctgacttcaatgcccgaaatttaatcttaaagagtgccaagacaattggggtattagttcctaatattgctaacccattttttggtacttttgtcgagggagtgcagagtgttgctcgtgaagcagaatttattccgctcgtctttagtgccaaccgtgacccaaaattggaaaaatattacctttcccagatgattgaacgatcaattagtggattagtgattgctagtgcaacgatgactacagagacaattaaagaagttatctcctttaatgagattccttacatcttgtttgatcaaaatcatacgcaggagggtgatcgagttcaaacgaatgattaccttggtggtcaaatcgcggctaaacacctcattgaacttggtcacaaacatattgccgttcttacctctgacaaccctactgaaaatttaaatcaccgaatgaatgggttcaaaaatattattaaagaaaataacctaagtttagatcctattcacgatgttattcgggcacctttgacgaaggatggcggatataaagcagcaaaagatgttttagcaactggtgcttctgctgtttttgcggcgaacgatgagatggcaattggattattgcgaggattacatgaattagacgttaaagttcccgaagatatttctgtaattggttatgataatatctactgggacgactatgtttatccacgattaactacagtacaacaaccaatttttgaccttggcgctggagctactaaaatgctcattgaacagattagtcatagtagtgcggaagcccgcgttcaaaactttccagtaaaattaattaaacgagatagtacaagttcctatcgtccaaaataatatggtatgatgatattatcaattagatgccaattgtttaaggaggaaataaacaaatgacaaatcatgtaacaattgtaggcagtttaaatgttgatacaacaatgaaagttaagcggatgccattacctggggaaacaattgccgctttaagtaagactaatgctgctgggggaaagggagcaaaccaagccgttgctgctgctcgttcaggcgctgaaacagcttttgttggtcaagttggtgatgacgctggtggtaagatgatgatcaatgacctcaagaacaacaacgtcgacacaacagggatccacgttgacgatcaagcaggtactggatctgcagccatcttgcttgatgaaagtggtcaaaacagtatcttagtgtacggaggagctaaccaacaattaagcgttaaggaagtagaagatgctcgtgatcaaattgccgctgctgattttgtgattgctcaatttgaaactccacaagaagctactctacgggcattccaaattgcaaaggaaaatggtgtaaagacaatcttaaatcctgctcctgctcatgaaattaaccctgatttattgaagttaacagacttaatcattccaaatgaaacagagagtgctgctttaacaggaattattgttacagacgaaacttcaatgcttatgtcagctgcaaagtttgctcaaatgggtgtccgaaacttaattattactgttggtgcaaagggtgccttctactgtactcaagatggctacaactttattcctgcttttaaggttaatgctgttgataccactgccgctggtgataccttcatcggtgcgctttcatcccaattaaagcctgatatgagtaacattgaaaaggcaattgtctacgctcaacgtgcaagttcattagctgttcaaaagcttggtgcattaccatcaattcctacttatgacgaagtagttgctgcatcaaagaataactagatttacttaaacacaaattaacaatggggaggctgaggaaagcgaaaacttttctcagccctcctatttttttcagtaaccttgcgcttaacgtaccaatttagtaaactgttgaacaaataataatggaggttttctttgtgaaagcagaatttattcttaaggtggttattccaccatttatcatctttgcgatcctcgtatggctaactgccgaacattatatctctggctgggtaatgtaccttctctgggtaattggtttcgtggttgcaaacatcattgtgacaaaaatttctacccggtggagtattcaacgaatgcgtgagaaacgggcaaaggaagagaaaaataatgataaaagtaattaaacaatcgtggatatttagggtgattttaattgcgctgatgttaattgcaattgagattcccccgattgcagttaattttgctttacgttattcaaagaccaaccagcttatcgtggacgggttcatggtcttattcatctgtttaatgctagcgattatttggtgggcacaccggacatatgaaacttataaccaattaggacagccggcgggaataaaggttggctggattatcggtggttatctagcgattattttgggaatggatgtccttagctaccttaatcaacttatctatcatcaaactgaaacagcgaacaatgcagcactaggaagcatgcttggtcataatgaagtaattacgatcgtattttgtttttcggcagttgttctaagtccaattgctgaagaatttatttttcgtggtacattgacaaatatgttctttaagcgtggcaacatctggccgaaagttatcttctcgggggtaatcttttctaccggtcatatgagtaccaaccccattagctttttgatctatgcttatatggggatggtcttagcatatgtttatttgcgaacggatgacattcgaaattcaattgcaattcatatgattaataatgcgattgcgatgtatgttctcttggttcaagttatctaaagttgcttcttgaaatcgcttacaattggtggtacattataagtgtggaaagattagaatggtaagatctcctatatcaatctagcaccgaagaaattaatagtaggctagaagcaacctaagtgtgacatgaaattttagactgaatatttatgtaataaggtcaccagggtgcactaggttgatgatataaatgcgactttgcggaagttagaatcaaaatgaattaataattagttccctagcaaagtagcagattctttccgcaataaacaaaagaggctggaaatgttccggcctctttgttatttttaaatggtaaagaatttagggacgtacaataccctttagggttgacactttaaataataaaagtgccaattctagggggtgtttttcgtttctagttattccacaacagaaaaattaagattactaagtaattatcaggattcagattgctcattaggaatattcgctgactatcacgaagtgagaacagcgaacatgactaaatggattaaacaatttttattagcaggactggcaggattaattcgtcctaaacataaccaaaaatattcacttaagacaaagattgccgcggtgaaagattatcagcttaacggactggctagtcgtgaggttttaattaagtacaaaatacgccatatttctcaactaaaacaatggattatccagtacaatagtgacaaactaactgttgcttacgcaacaagaaagcgagttaagaaaatgggtcggaaagtatcctttgatgagaaaaagcagattgtgcagtggacgattaaccaccagaacaactataaagaagcagctagtaagtatgatattagttatcagcgggtttattcgtgggtacgtaaatatttgcacgatcataattgggaagtactaaaagataatcgtggcagaaataaagataaagaaccgacaaatgagctcgaacggttgagaaaacgagtacgtgaattagaagctgagaaacgagaaagggaggtacaaattgcgttcgcaaaaaaattagtcgaaatacgcaatcgggaggtgcatcgaccggacgatatcaagcgattcaagaaatgattaaagacggttatacagtatcagaactagttaaagcggctaaagtaagccggcaagcctactataagtggctaaaacgagaattaactactaaggatatccaggatcaagagatccttaatttgattaaagaaattgagaaaactaataagcaaagtattggctatgggaaaatgactcgtcttattaagcgcgcaggtcttggatatttggtcaacaaaaaacgagttattagaattatgaaggaacatgagattaaagctgactatcgtcaagctaaaagaaaacgcgacaaggaacgtcaaacctatcaagctgaaaatatacttaatcgtcaatttaaacaggaagcagctaatcaggtttgggtaactgatacaacagaactcgcctacaatattcataattataaagttcgtttacatgtggttcttgatttatatggtcaatttccaattagctggctaattaccccaacagaaactagtgagggagcaattcaagtattcaagaaagctcagaaacaagaaggtgtattagccccacttattcatactgatcgcggagctgcttatacttctaaggcgttcaatcaatatttaactagcaataatagtcaacatagctattcagctcctggcacaccagcagataacgcagttatcgagcactggtgggccgactttaaagcaatttggctagcgcattcatctaagccacaaacacttgatgaacttcaaacactagtggctgaaggaattgaatactttacaaatacatttatttcagctaaaagaaatgaccttactgcaacggaatttcgttacggcaaagccaattaatttttattatttagtgtgtaaacttgacagggtacagtaccggaggataatagatgtttttatcaactgagggatttcctcaagcccaccgcattttagggattgtcaatgccaccagtcatttagcgatgcctaccgaagcaattgattcatttgagtccatggaccaattatttagtgatgttcaagaaaaattaaagcggcgggccagtgaaaaaggtgcagatggtgttgttggggttcgttttactacggatgttgccaatatgcaggttgcacccaaattcttggtcctaaccgcatatggaacaatgattcaatttgttaaataagggcaaattgaggattgtaaataaaaatacttgtaatttttgatgagttcggtatacttaataatgttacaaaatagttagtgcctcagtggcggaactggcagacgcgcaacgttcaggtcgttgtatggttatccatgtacaggttcgaatcctgcctgaggcattttttgtattttaaatacttttcgatagtgtctaaatcgttgatatatcagcatttttaattttaggtttacactatagaacactatttttaatcaaatccacgacaatttcacgacaaaataatatatcttcttgccaacgtgagccacctgtttttaggtggttttttattttgcttgtggaaatatctgcggaaaattcagccattttccttttagggtgtctgaattgtcggaattattgataaagtgtctctgattaattgctaaaaaggggatgttttagataatttaatttttatgattgttgatatatcaaaggctagggaaggacagcccctctaccctaaaattttaaaaattatcgtttgcacgcaagacgattgaaatgtgtgcgctcttttttgttcaaagataggggcgggggatgatataattatttttggttttatttatatctcaagggcgctctcacagcagagcgccttttttaacgcaatttaacgcttttaaacgctataatatacatatgaaaagcccctaagagttgagctaccaacttgcaactcttagggcggtgattaatcaccacttgatttcaagttttaagtctagcgatataaagattttgagctttaatctaatctttattttgctaggctttttatttacttttaagcgcaatttaactccaacatttcccaacatctgctagtagaaaatgttagcatttgctagcatcatgcttttataaattcctagcatttcctagcatttctgagcattttaacactaataaaatcctaggatttactaggttttaacagtaaagctagaggctttcaagggctatcaaaatagggtgcaacctttctcgtttttgtatgcacacttttttggaaagtacgcatactttttaatgagggtgcgcactaaattatactcaagataatatgctaaaatacctatggggcgtgaaaagtaaagttgttaatttttcgacaatatcaagggtagcttgtgagggctactctttttttatcctaccatttcctaccatcgtgccatcatttgccatcatttttaaactgggttaagcgattttttgaggttagcattggttaacattcagtatatccaaagtgataatattagattattgagtggtgcaaaataaaagggcggtctaggtgtctaggtcgtcctttagttagttaacttgtttttttacgggtaagcgcaattttgcgccctcgtcacttaatcgcttggctttttgctcttgtgctagtgatattaatttgtctaggtcgtctttatctgcatagtgtttaataaacgttttagcatttgaacgatattgatatagtttgtttttctctgggtgtcgtttcttgtatcgtttagtagcttctgcctgtgcaagtgtaaccatgaaaacatccccttaaattgcatatagtgtaatatagtgtcttatagcgtaaagttatatcttgtatagttatatgcacatgttataattgtttatgtaaaaaggcgctaggttgtgctagaacctaacgcccgacgttttcttgctagacaggtttacttcaaagcattagtagttagtagctattaatgcttttttagtaggctgattgcaataacaactacaaatacaagcattttatagcttgtaaatgttaatgttatgctcaccgccagaacctccctagcagtcaagaaacaaacacataaccaacacttccgtttcttgctgtgcttgtaaaaggctggttggtgtctagcttcttttccgccttgataagtgctaggttaattactcctattacttatcatgcttatattatatataactatcataagcatattcaacaataggggaacttctaatattgaatgctaactgatagaataaattcataccctttttagggtaaataaaatcatgtgatataatgaattgctttaagtttgtatctaaggggcgctctcacagtagagcgtctttttttattggaatttgttgcacaaaaaagtcgatgtgcgttcccaaagtatcaataaaccaacccccgttaaaagagaacgggggcttttttagtatggtctattttgatagcaaaagaggggcgaatattgctctttcttgctttcagttttgacgttaaatgtgattatatcaacgattacagctaatcactcataagcaataacaattaactacgaattagctaacgagtataagtttttccgatattgttttaactacaaacatccccgaaaatgtgcaatttttggcaatggtttttaattaagattgctgttatatcaaccttttagatgaattgataaattgcacattacatggaacatttactgtttcacaattccaatgtttttatatgcggttgttaccttgttaccgtaatagccaacataaaagcgatggtgcttttgataaacaaagcccaacaattccatgttttgcttaaattggcgattacttaatggagttatggattgttgttggcaataatctaaatagcaattgtaagccgtacggcaagcggtatataaacgcctgtctttattgacgttctcagaaaatacaaaattaacgacggttgggtctgctttatctttgttcttaactctaaaatgataatctttctcactttcagccatccactgtgctaaggatcgcttactaaatacataatgcccacgataccaactcatttataatcatcccctttgtactggtctttcatgtagtgggtgaatagccatataaccgcaatatcagcaaaaaggcttgccaaactacatgcaattgctccaattaacagacacgatacagcgaacatttaaatcaactccatttttctatatatgctaattttagttttaaagccgtctgagccgttttaacttgcaaatgataaattatatttaaaactaattatcgcttttaaaaccgcctttaaattaaaaataaacactattctaaatctgattagtatgtttattgctatgatcctacgagtgatattttggcggtcagattttaggctgtcaatttttgatagctgaattttaagccaccaaattttagataatattctcgtgtactgtaaggcgttttaagaagttttaactaaaagatgatgatttaccctaaaaagtaattaacgataaatagcgacggtcacgatgtggatctctggaaaataaacgggtgtttaagcataacctctccgccaatccaatatctttagcttttccgtccaattgataacgaaaaattacagttgagctattgatatatcagcatttgggctagtaaagcattgcacgctttttgtttccttttccgccgaataaattaaatcatcccccgattatcgttgatataacagtaattgggggatgtttattttcatcgctctagttgatcgcattcgtccaatttttcattaattgagtagttactgaaatagctatcaattaacttcttcttagtttccctattcttgcctgtactatgtgagtaatcatcaataacggctttaaggtgattaactatctgcccctcgagttgttgcgcctctttgagctttttattgtacttggtaacaagctgcttattttgctctagcagggtaggaacatggtgtttaattatacccatgtcgtccagtatctttttatgggcgaacggtattttgattaggctcttattcaattgtgcttcattctctgcaatttgtttgtctagttccttaatctgggtcagcttgatgttgttagtatcaagccccagtacaacgctagacagatgatcttcaatttcttcacggttcatagtaattacctctttttatagtccgactaatctgtcattacttttaagggtgcctaatctgcccaaactgcttcaaatatttattagctaatttatcttttgctttgctttcctcaccattgcttcttagataatcgcttctaatggtctttaattgcttttgaagcgaactagaaagtttcttggcttttattagctttcgattgtatttaattattaagtgcctgttttgtttgagtagggtaggcgtttgatgtttgaaaatacctagaccatcaacaaaatacaagtgggtaaatggtatcttgattaagctatcgtttaattgcttttcgttggcttggattaggttgtctaatcgtttaatgtcactcatcaatttagtataggtttcatatccagtgcaaaagttagaaaggcttttctcaaattctgttaggttcatgaatgtatcacctctgcgtcttaatcattactagaggatcgttccaatgtttgcttggtgtactcgggtaggtgctgtattaatagcttggctaatgattgttcgttttgatattgtggcatttgattagcaacgttcataatgttatcaattcctaattggatgtcctcaatttcatagccattatggattaacatatcaaaaacatcagcaagtcttttattatctttggggatatcagtagttgatataccgtttaagtagttgaatagactgttaatgttatcttggttggctccactatctactgcactgtttcctccattctctgtagtagcattattctctatagaggaagtagagctgtcgtcgttaagaagaatttccccatacccccattagaagaactatttatatacttgtagttattttctttattgatcttttctttgctgttctgagctgtactgtactgttctagtctactcttatctatactattcttatctatactaggtgaccctttagtaatctttttgtttacgttagatttaccgttcgttaccttttgggttaccacacctttcaaacgctgttgttgcaaggctttaagatttatctgtctgttgcgattttttctctctacccaatcatctaatggcaaggcaatatttctatcttctgcgtttattgtgtatttaaaatcaattctgataaataccttactggataaatcgagaaaagaagttctagaatagtgatttaataattgagtatttagccagtcaacaatcaagtaaactccctcaacattaacaataagacccgcatgttctaattcgctatagttttcagcggttgctttatccatcaaattaattaaagaaacatcagaacaaaagccatcatcatcagcatatagcactaaatcatcgtaaagaattttacttacaggcgataaagtcaaaaagcgtccgtcttggtgtattgacttactaatcattcttctttgtgccattactttgatcctcctcttggtaaacattagttacacggatagccttaaaaggaattagcaagtcatcatctttacttagataataaggggtactatcacgccaatatatccgcttgctaatttcatttcctgtcgcaaagtcatttaatatcaaatttccatcttgattagttgcttgaagcaatttcattactcatccctccatattcttatagcttaattgaccatcaacaaatagctttgttaaagcgataaggcgtttaagcatttcaacatcgttatttgtgacttgttcaatgcgttcaacaatcttttggcgttctcgctctttctttttgttgtgcgctaagtaatttggattgttaattgacttcatgatgaaataaaggcgagtggtgtttttatcatcgttgttcgttagcaaggacaacttagaatataagtcaccattgaagccgtctaagtaaactaagaaggtgtgaacttgcttaatatcattcccaacgaacttactaatacgggtagcgagttccgttggttctttgctgttctcggtgtttttaagatatgaataccacgagagcagggcgaggtaagtagttttcatgtcccaacgttcacggtgtccgtctggtgctgtaagagtaactagttgcattctgtatcaccgcctttgagttcaagagttgctaattgttgcaatgcttctaaatcattatcatttaggcgctctaagcactcatgtaaagcgctgataatatcttgctgataattgaccgttaagactaggctagttaaatcattgtgggtgtaatcatcctttaagcatggagctaaataatcattgagcctttcgtgataatcaattagggatgaaattaatccgctcatggtttcgtggtctgctataagctcatctattttttcagtcattacttgttaccacctttataaaagtcttcagcaacggttttaatttgattttgagcgtttgtcgttgctgtaattgttgcttttgctaatgctagtagtttggttactaaacgatcagcttgccacttcacgcccttatgtgtacttggatattcagtgaataaggaaacattgtcctctaaaaggtcgtttattgtttgtgctagtcctttaacagtatctaaagtaacgttagtgtcctctacttggtcgatattaaatttcttcatgattgattattcctccatttgttggggatattccccgttttaaatactgaaatatgttagaataagcaagcaacgggctttatccgttgcgcttattcttttgttgctgttaaatgctaactactttggtcggtgagtagcatttgacggcttttttattttgtcgaaacattattcttcactttctaaatctgcgttactgattgcctgcgctcgcttactcatcattgttatttgtgaggtgaggggagctaaggcttgttgtcgttctttgtcattggtgatgatgaaatatccgttgttaggatgttcatacttagcaccaattggctgatggtgaattacgattaagcgattaataattcctctaactctgcgattgctccatccagtaagtttcactaattctttgagtggtcgagggcgttcaatccctttaggcaacaagtccaatagttgttgctcttctttgtctagttgtttcatcggcttcattcctttacttgattaactgagcgagtaaattcattgctacgagtacaacaggcaaggtaacaaggtaagcccaaactctttcacttggtgctgtgtcccagtagcttaatatgtgtttatcaatagttattaaaagcttcatgataataaatcctccaatatccacgctggcaagctgatattatttatttttcgtgctggatcaaaaactcatctagggctttacgtctgaaacgactaacgccctcaatcttaattgtggggatgtcatactttttaagccaagcattgaagacaccccgtgatacaccacaataggcactagcttcgcccttattcagataaggtgggaagctatttttattttgcacatccttaatcgctttattgagtgcatccccaatcattgctttggttgcttcctgtaaatcatttggcaactgcacttgtaaactttccatgttctcaactccaatcattaagctaatagcaaaacgccttttacttcgtcccacgtcttattgaggccaacaaggccaatagcgatattctctaattgctgataccgttcttgctctttgagtgttagaccatctaacgcaactttgacgtgtcgctgtttcttaatttgctgtgctgttagaccagtagcacgctttaataaaagctgtgtcatattgcgataactccattgagtaacgtgtggccaatccttgacagcgtccatcaaagacttacgctgtggcttttcaatagctcggttgatctgtcgttgattaagctcttttctcatacggtagaactcatgaacaaggtttttcttgaattgatttacctctggtgtgttatctaggtaggtaattaagagcgtggcttgttgttcgttaaggtggtaggtcttttgtggtcgtccacgtccatttaatttacggatttcaaatcccaaaactccgaactcttcaaagtctcttttatgattacggattaggtgcttaacattatccaattgattattactgcattctgaaatgatcttatctgtggtatacggctcttcattcaagccgtgcatgaaaactagattattcattcaaaacatccccttatttgtcttgcgtttttgagaattcttttattgatgtggataatttatcgaattaattagttgatgtctggctttgtacatctgtatgtacgttactcaaaaatgctggcgttttatttaattcttgcaagtgatttttttgtgcctttgttaacggtgattttttccgaatagtaactttcccgttgtctacatcaccctctagcatgattaatcgacctgttgagttgtaccctttgcgctggggatgagttacatatttctcgtacttcctagcatgtttgggttcgttcgtgtaaatgtgccatatccctgttaaacactcgtaagaaataatcgtctcacgttcttcttgtggagctactttcatatttcgtttaacttctgtcattccttgtcacctctacttgtcttgtgttgctactgcggtgctgtctttaatatctgctgtggcgtactcgtcaataagccaatcactcaacttcttataagttgctggcgttaccttgcgatggttacgcttaaagatattgtctagcgtccatcgacttaaaccgagttcacgcccaagtgctacagtagataaattaagttcaccacgtttgcgtttgatagctattacttgcttatctgttagaaacattggcatttaatatcacctctattcacacaactgtgagtaaatattaattcacataactgtgaatgtcaataaaaatgttcacagttatgtgaaataatgatattatttaatcaagtaaagaaggtgataatatatgagtgaatattcctatcatcgctataaacatcacaatagaatcaaagaattgagaaaagaaaaaacctaactcttaaagagctaggcgagaaagttggtatgcgagataatacgttaagccaatacgaaaacgaaaaaagaaatcctaacgatgaaatttggagaaaactcgctgttttctttgatgttagtacagactatatcaaaggattgagccacgaaagaactgatccttatgaaagtataggcagaattattaataaaattaattttaccgatgataaagataaaaacgataagataagagaacaattatttgaagcctttgctatcgtcctagaaagtacagaagacaaactagtagatttagaaagtcgaattgataatgttgaccctaactatcatgacccttcatggtatttatagttaaaagctactaggagagacactataaaaaactttattattaacgcatttgattgcatatcaaatatcgttgttgaagttttatgtatcgtacttccttaggctaaatagagctaatttatcagaggttttcagaggtagtgtcattgttcgatgtgatattttgtagtaattaatctgctgtttttctgcactttttacgttgaaacccttgctgtgcttggcttctttctgctgatttattgctgatatagctaatatatagccgtttaatgttaggttttgtaaggttctatactgcgaaaccaatatacacactaatagcgccactgttatcaccactaatagcaccactgctatatttccccagttttggggacatctgctaagaattaagccaatgttcaatcggtcgaaaactcggctgattacatccgtccaaaatcggacacatcttactcacctcaattttggggtaagtacatctgcacataattgcgtgcgtctttactcggctcaaaattgagcccggcaaaattgcggagtgaatatcactcagccgaaaacttggctcagtacatccccttttgacagcgcaaaattgcgccacgaaaactcaaatacatacctccaatatccacgttggcaagctgtgcgattgaaagaggtaattttatgagttatgtaagaaaagcgaaaaaaggatactacggttatgcaagctaccaagataacgaggggaagtggcatcagaaatcagccggctgttttaatttaaagcgtgaagcactgcaagaagccaataaactagaagcagagttagaccaagtgaaccttgatttaaaagatatgacactagctaagtattattggcggtggtatgaactctatgaggaaaatggtattactgatgttacgaaaaaccgttataaggttatacggaaagccattgaaagctactggaaagatacacgactacgggacatcaagcgctctgattatcaagcctttattaactggtacggtgctaatcatgctagggacagcgtaaacaagctcaataatgctatccgttcatgtgttggctatgcgattgatgatgatattatcagcaaagacttcacgcataacgtcaaggtggtagctaataaagagcgagagcgcaaagttgaataccttagtcatgatgagttagtgacactaaaaaatgaggtcaacaagaagctcaatcactataatacaagccgttacatgatactcacggcaatttatactggaatgcgcaagagtgagatacaggcgcttacgtggaatgatatagattttttacattcaacaattagtatttctaagtcgtgggacgaaaagaaaaaaactttcaaaccaactaaaacagaatctagcaagcgaacgattaaggttaaccgtcaactgttaaatcgtttagctgaattgaaagctaataatagtattatggtgtttcaaaacgtgttagggacaatcccaacaagtaacgcattgaataagtgtttgcgctctattatgaatgactgtggcatcgaaaagcaagggtttcactttcattccttgcgccatgttcatgttgcctatttgttaagtcaaggtgtcgatatatacgccatcagtaaacggctaggacattcaaacatcactgtaaccttaaatacttattcttatctggtggatgagtacaaggctaaaaatgacacgctaatcattgataaactggctgaattatagagttcacgacaaactcacgacaaaataaagctcaaagcccgttatatcaatgtttaatattcctgcctgaggcatcatcatagctcggtaaacattgatttgctgggcttttttctttatattgaaataaaactgcaaaggaagaccaaaatgaaagttttatcaattcatcccgaatatggaatggaaatcttaaatgacacaaaaacagaggaataccggacatggacaactaaatatcgtggtgacctcctaatttgcaatagtgcaaagaagacacatggggcggtagctagtcatgcgttatgtgttgctaagattactggaattgaggaacgatatgacggtgaacaaaaatattatgcatgggtgattgcaccctttgaggaaggtggttcttattggattgaaccattaaaagttaagggacagttaaaattgtttaacgtcgatgaccgcttgattaaacctgcgccgtttactaatcctttctcaaaagctggggaacaatggtaccaggaaaagattgcgcccttaatctattaagatattttcaccaactaacttatgcgttatgatagaaaataaaaaatgaaggggcaatagcttatcggaaagattagaattaacaacatggcatttaatacttacaatggtgtgtttgcggaagagaaaaagcttggtcaaaaaattgaaattgactgtgaaatggactacccaattgaaacgatggttaaaaccgatgaattagaggaaactgtcagttacgctgatgtttatgaaacaattgcggagtttgttgcccaccataattacaatttgattgagagccttgctaataatttattgcatgagcttttcaaaacatacccaatgcttaatggtattcgccttcgtattcgtaagtatagtgtgccaattgccggaatttttgataatgtcgaaattgaagtagcagggagcaagtaattatgactgaagtttacctaagcattggcagtaatatgggcaaccggttagcaaaccttcaaaaagctattcagatgctgaatgtgccgcctaaaattgatattacggcgatctcctcagtgtatgaaacagaaccggtgggaggtgtcaaacaagattctttttacaatattgcggttaaagttgcaactgggttaacagctcagcaactccttgaccatcttcacaatatcgaacaggagttacatcgacgccggctcattcattggggaccacggacaattgaccttgatattattgattttggtcatcaacatattaaaacctcaacgttaacaattcctcatccagaaatggctaaccggcagtttgttttattaccaatgcgcgaaattactaatcaaaatgatccttattatcaacaattggatcatttattaaataagactccagaccataattggcttaaaaagatatatggacgagaggtattttcatggaccaacaaaaaatagcaaaggctgttaaagatttattaattgcaatcggtgaagatccggaacgagaaggattggcagagacaccccagcgcgttgccaaaatgtaccaagaagttttttcttctcttaaccatcaaccagaagaagtggcgaactataaggtctttcatgttgatgatgtgccagaaatggtattagtgcagcacattcctttttattcaatgtgtgaacaccatttgctgccattcttcggatacgcgaatgtggcttatgttcctaaagataagaaagttattggcctaagtaagatccccggttgttagattttgtaacgaaaaaaccggggatgcaagaacgcgttacaacagatttagtagccgagttgcaacgaatccttgatccagccgggattgcagtaaccattgcggcccgccacctttgtatggaaatgcgaggtgttaataaggccggtcaatttacgtatactgataagtttacaggtcaatttaagactgacagtgatttgaaacaagaatttctaaatcaaacgaggaattatcgtgcagacctatgaacaaattaacgcgggctttaaccgccaaatgttgggaggacaacaggatcgggtaaaatttttacgacgaattcttactcgtttaaaaaatcctgaccagcgatttaagattatccatattgcggggacaaacggaaaaggctcgactgggacaatgttagaacagggtttgcaaaatgctggatatcgggtcggttattttagcagtcctgctttggtagatgatcgggagcaaattaaggttaatgaccatttgattagtaaaaaagattttgcgatgacttaccaaaagatcaccgaacgcttaccaattgatctttcgcctgatgatattaccatttttgagtggtggaccttaataatgctgcaatattttgcggatcaaaaagtggattgggcagtcattgaatgcggtttaggcggtcaagatgatgcaaccaatattatcaatgcgccttttattagtgtgataacacatgttgcccttgaccatacgcggatcttaggcccaacgattacccaaattgcccaagctaaagcagggattatcaagaatgggactaagcaagtgtttttagcgccgcaccaagaaaaagacactctcacaattattaaggcaaaggctcatcagcaaagagtgggattaacgcaagcagatgcccagtcaattgttgatggaaaggcaatcctgaaagttaatcataaaatttataaagttccttttaatttattagggacatttcaaagtgaaaatttgggcaccgttgtcagtgtatttaattttctttttcaacgaagactggttacttcttggcagcctttactatcaacgcttgcgacagtgaagattgctggtcgaatgcagaaaatcgctgatcatccttctattattttggacggggctcataatccagatgcagccaaacaacttaccgaaactatctctaagtttccccgtaataaagtaattatggttcttggttttcttgctgataaaaatattagtcagatggttaaaatttatcagcaaatggcagataagataataattactactcctgaccatccaactcgcgcccttgatgtaagtgagttgaaatcagctctgcctcaagcgattattgccgataatccccgaaaagggttagtggtggcaaaaaagattgcggagccgaatgatttaattattgtaacgggttctttttatacgattaaagatatcgaggccagtttagatgaaaaataattttattattgcaacccataatattcataaaattaaagaaattgaaaccattctaaatttttaccaccaacacggtgaggggtatcgaaaaaagttaccgcaacaaacctttcctcctgaatcaatagtgagctatgaagaaaacgcaaaggcaaaggtcctctttatcagtcaacaactaccggcagcaaaaataattaccgatgattctggcttagaactcccggcttttcctggaaggtacggggtgcagacagcgcgggaattggcacaagaagttcctaatggtgatttaaatgattacttgatccatttagttgatggtaaatcccgacaatttataatgaaaacaacaattgccctggcgataaataatcaagtggttaaaattggtcatggtcaattaaaggggacaattgctcatgccgaacgcggagtcaatgcgacggggtttgatcggatttttattccagctggtgaatcacaaacgctcgccgaaatggaccagccgacccgcatttcttatttacatcgtgcacgagctgttaaaaatttattagatcaattaggagaatgaaatgaaagttactgaaaatttagttactaaagactattcgaagttagtgtccgcgatcttagccgaccaagttaatcgccatcagcagcttttattgacgtgggagtgtccagatgtggagacggctggaatggtagagcgatttatccgtcattttgatacccctgtcgcttgtgttgaaaagcgcgtagaattttctttcccgctcctttccctaaaagaactaatagcacgggtgaaagagcggtgggagaacgaccaagaattaattgcttctcttgaacaggtttaccgtcgtcaccagattatttggcgtgcaggccggtttacttttgatctgacagagcaaccggtgatttatggaattttaaatgtaactcctgactcattttatgatgggggtaaatttcaatcccattccgctattgctagtcaaattgctaagatggtggcagctggggcaaacgtaattgaagtcggtgggcaaactacgaaaccgggtggctttaaagaggttgatccggaagaagaaattgcgcgaattatgccggctattcagcttcttcgcgaaaactatccccagattgcgatcgcagttgatacgtataaactcccagtaatggcagcggcaattaaggccggagtagatattatcaatgatgtgcaggcatttaattcaaaacaaaaactaattttgatggctaaggcaaatgttggaatggtaacgatgcatagcagccgaacccatgactatgataaccttaccgtagcgatgcagaaattctttgaacacaatcttgggacaatagcggctgctggcattgatcttgaacgagtgattttagatcaaggaattgggtatgcaaaggttgctgacggttaccaggattatgcgacgatgcgaaacattgaccaccttaattacctccagcgcccgattatggttgcgatctcccgaaaaggttttggtcaaaaattatttaatctagcaaaagaagaccgtctcggcgtaacattgattgctgagacagcaatgtatttgcgaggcggtcgtgttttacgagttcatgatgttgaggaaactagtcagttagtgaaaatgattgacactattgaaaacagttattggtttagatccaccagcagccaatccccaaggcaataataagggcaataaaaagtaaggctgttagatagggattgccaaatgtttcccgtttaaggcggaaagcagtttccattaagatatagattagaattaaaaagatgatccatactaggttgctcagaagctgagtcttgaaatgaagaaaggtatggacaatcgaagcggtcaataaaaggaaaaagaataaacggcttagttcaagccagttagtcactttccgttcaatttttgcatgcagaccagtggtagtgatgagaatcaaaataatgattaagaccgccactattatttttaacatatgggtaaactcctttcggctttgattttagcattgatgagagaaactgactatatgcgttagtgtaagattttcataggttggatgaataattcatctggtcgtggaaatcttttttgtagaccaatttacttatttacaaaaaaagaaaagaccagtagcctttagtgtgtcgaatactaagcaaaggcaggtctttcctcatggatattttaacagaaatcgagcagaatttggtgaaatcaggcagtttatttgaagctgaacagattattttaaaaggggtattggagttaggacaagtaatcatgcaaaactttttggaaagcttagatcgaagcttaaagtcccaagctccagcgaactatcaagtaattaataaacagccacggacgcttaattttatctttggcccggtgacttttcaacgacggtattatcaggctgggacaaagaaacgtgaattttacttagaccaacaattaaaaattaaaccacgtcgtcgtttatcgccacaatacttaatgatgatggctaagattgcccaaacaactacaatgcgcaatactgccgacattttgaaccttgtatttgacagcggaattactgccgattcggtaatgcacgccgtgcatgagttaggaaatcaggtagctaaacaaactcaagcaaaagaacaccaagctactcctcgccatatgcctaaaaatttaactattgagggtgatgcctttatgattaaaggtaaaaaagaagcaggtcagctgactcttgtgcaccattatcgggtttatgagcgagtagctaatcaaatcattaatcggcatgactttctcagtgttgggcaccaaggacggcttgaagcacgactaagtgattatttagaccgccattataagcttgccggtcaaacgatctttttggccagtgacgctggcccaggttacgaaccagctaagctattaagtctagttcctcaaggtgcacatggtgaatactttctcgaccgctatcattgtttacagaaaattgaacatactttaggccggcacaacgagttagccatgcgagcaattaaagccgttcgtcatcatgatcaagcagagctaacaataattttagatacttatgaatcacaaaacctaacggaaaaacaagcagacgacctaatgcgtttaagaaagtatctacagcgaaattggcggtatatcctctcaccacaaatgcgtggatttaaggatattcatttaattggttcagtcgaaagttctcaccgggcttttacttaccggatgaagaaacagggcaagtcatggactaagcagggggctaaagccatgattggtttaattgaagcccgaatgaatggtgaactgcaagctagtttaaatacaatcctagaacaattaacagttcttcctcgagtggctcaaaccagcctattacaggaaatgcatattcgaactggagagtttctaagaaaggcaccgacaaagccgtcaattggagcagtacaaggaataattccgattaacacggccacaagtagaccaatgggacaactttttaaggcactaacccactaaaactgtatatttaaaggctacctatgaaaacttgacagatacactatatgcttttgacttgaaaatataataaaaaaagtgtatggtacgtatattgcttgcgtaaaaataaataatatttgaggtgaaatcaagtggcagattttgaaattggcgatattgtaaaaggaaagaaattcggtcccctcgaacatgaattttctggtgttgttgaaaaggtttatactaattcaattatggtatccatccaagattttgatccgtctgataaaagcggggttaacgaattaaatggccgcgctgttattcgccaaaaagaagctaagatggtaaaggctgttcctcgtgaagaagaaaaggatgacgaagaaatagtagaagatgctaaatcttcaaaaaaatcttaaaaaaagatgacaaataattagaagaggtatatactaactaagtgttgaacttagttagttaatgcgggtatagtttagtggtaaaactcaaccttcccaaggttgcgtcgcgagttcgattctcgttacccgctcttataaaaaagctgaggctaagagaaagttttctcctagcttcagcttttttagatctcaatcttagctaaaacttgatgcattgcttcagcagactgttgcatctttttaacttcatctgatgttaacggatattcaacgacctggccgattccttgattattaatgatggcaggcgttcctaagtacaggcccttaattccgtactgtccatcaagcggagccgaaatcggtaggacaaggttccggttttcgatgattgcccgtgtaatatacgagaggcatttagcaattccgtagaaagtagcccctttattggcaattatttgactgccagcttcgtgaactgttttttcaatttcacttttatcaatatttgaaagggcagtaattgtattgagggcctttccaccgattgtgatttcattaaaggccgcaaaagaagtatcaccatgttcgccaagcattaaggcatcgatgacattgacggataggtgtaatttcttgcttaagaggacccgtagccgcattgaatcaagagaagttccggtcccgataacccgttctttaggaaaaccgctgattcgctgcgcaattgttgtaaggatatcaacaggattgcttgagataacgaaaacaccagtgaatccacttttgacaatcggttcaataattgacttaagaatcgtagtgtttttattaactaggtctaaacgtgtttcaccaggtttacggggaatccccgctgtaataacaaccacgtcagcatcagcggcatcttcataggttcccgcataaatctttactgggtttgtcaggggtgtaatatcagcaagatcagccgcatccccaactgcttttgaccttgtacgatccaccagtaccaattcatcgacctcatttgttgactgcaataatgaaaatgcaaatgatgagccgacagccccgtcacctattaatacaactttgtgcctatacgtatcaagcatcaaaaattcctcctaatgcagctccttttgcgcatcccaatgattgattgggccaaatttatgaccaaccgttaatggatttgcgattgctgcgtaaacggcatctttagcctttgttactgctattttaacattatttcccttcgcaagctcggcagcaatgatcgcggagaaactatccccggttccattcaaccgatcagtcttaacaaaaggttttttgagccagaagctatcaccgtcttcaagaagaacaaagtcatcaacagttgtttggctatcatcattatgcgcgcccttaatcaccacattttttgcccctaagtcttgaagataatgagctgctttaacccgttcttcatctgtggtcatttcaattcctgttaatttttgtgcttcatagaaattaggagtaataacagttgcaaggggaataattcgttcacgaaatagttcataggcggattgttcaagcaacattgcaccgtgcttagtaataatcacagggtcaacaactaacgggccaaaatgttcaggcgaatagttatcagcaacgacattaattacatcgtcattagcaagcattccagttttggatgctttgatgtcaaaatcttcacttaataccttaaactgttcggcaataaattcttgcggcattacttgggaagaggtgatcccgtaagaatttccggaaacagcggcagttaaaataccgtgaccatatacgccatccgcaaaaaaggcatgaaggtcagcgggcattccagcactcccgtccgaatcatgacctgcaattgtgacagcttgaattgtagggtttgtcataaataactcatcaacctttcattattatttaatgataataattgtaacatataataagtaagaaaaaagtaataactcacccttgtagattagtccttgtttttaaatctaaatttgttataataattgagtgtgaaaataggatttgaggagtagtagcactttgaaatctacagcgaccctttgttgatgagagttaggggcttttcgatttgtgaaggcgtgcctcagatatttcaattaaatcaatgaatgagtggaattctaattcaattagagtggtaccgcgggtaaatctcgtctctagtaagcattatgcttattaggggcgtttttttataagtataaggaggaatatatatgagcgataagcaacaagttgcagctgcattggcacaagcattgccagagatggatgttaaagaaattgaagctaagattgaacggccaaaggattctagtaatggggattatgctttcccgacattcttcttagctaagaccttacataaggcaccgcaaatgattgcaagtgagttggttgaaaaggttgaccaaaacggttttgaaaaggtagttgttgctggtccatatatcaacttcttcctcgacaaagcccaagttggtgctaagattttgcaaactatcttagcggatcctgaacattatggtgagattgatcttggtcaccaatcaaatgttacgattgattattcatcaccaaacattgctaagcctatgggaatgggtcaccttcgttcaaccatgattggtgaagctgttgcccggattcttgaaaaagttaactacaacttaattcggattgattaccttggtgattggggtactcaatttggtaagttaatggctgcttatgagatgtggggagacgaagcggaagttaagaaggatccaattaatactttgcttaagtactatgtgcggatcaataatgaagctgacgaacatccagaatacactgaagcaggtcgtaactggtttgctaagctcgaacatggtgacgaagaagcatggcggctttggcactggttccgtgaagtttctcttgaacggttccaacgtgtttacaagatgctagatgttaacttcgactcattcaatggggaagctttctctgctcaaaagatggaagaacctatccaattgttacgggataagaacttattgaagcctagtcgaggtgcagaaattgttgaccttgatgaatataacttaccaccattactcatcatcaagagtaatggaacgacaacttacatcactcgtgatttggcaactgcacttttccggaagcggatgtatggtcatgctaagtccctttacgttgtcggtgccgaacaagaaacttactttaagcaattacgtgcggccttaaaggaaatgggcttcaactggtgggatcaaattgaacacatctcctttggtttaatgaacttaaacggtaagaagatgtctacgcggaagggtaatgttgtttcccttgaagacgtattgaatgattctattgatttagcacggaagcaaattgccgaaaagaaccctgaccttgaaaacgctgatgaagttgctaaagaagtcggtgttggtgccgttatcttccacgatttaaagaactaccgtcggaatgctgttaacttcaagcttgaagatgttgttaagtttgaaggtgaaactggtccttatgttcaatatgctcgtgctcgtgctgagagtatcttacgtaagggtggcatccgggactttagtgatgttgacttgacaaaggccggtgctgaagcttgggaattaatcagcttccttggccaatacagcgaagcaatcaagcgggctgcattaaactacgatccatcagtaatcgctaagtatgctcttgaattggctaagaagtttaaccaatactacgctcacactcggattcttgataaggacgaagctcaaccagcacggttagctcttactcaagcagttagtgatgtgctcaaatctgctcttgacttacttgatatcaaggcaccagatgagatgtaaataaaaagcgtgtggagaatagccttgtagtgacacgaagctagttccactttatcttgctattattcgtgaaaatagaagagggagaggctgagaaaaacgtcgttttttcaacagcctctttatttatatgaactttatttaagatatcgtggaaattaaccacaaggctcgaggctaagtccgaacgataatcagcccgtgccgtgctaatcaccgttctatccttagcccaccgccttgtcgagaaggttaattcccactcacttcctcttcttttaatttctggtaaagctggcggagaaaatagcttaccatttgccaaaatgtgataaaataattgtcagctttttgaaatgaaaatggagatttgttaatgaatcgtgaaccacaatctaattcagatttgaaagagcgaatcatagagtggttaaaaaagacttgggcatcgttccgagtttggtttaaacactattggcagctctttgttgcgatgctgaaaaagttctggcatcggtatcaattaacgcgatggatcattgttatttttctaggaattttcttaattaccagtatccatttgacgtttgttgctaaaactgcagatgttaaaaatcttaagaaccggttgcaacggccaacaatgatttatgatcgtagcaatcaatcggccgggagcctctacgctcaaaagggaacttatgtggaattaaaagatatttcatcaaacgttcctaacgcggtcctctcgactgaagaccggaacttctatcatgaacacggcttttcagtcaaagggttaggccgtgctggcttcttactagtgaaaaacaaacttcttcaccgtgactatatctctggtggggtagtactttaacacagcaactggttaagaatgcctttttgactcaacaacagaccttctcccgaaaggcccgggaaatttttattgcggttgaggtagaaaaccaatacagcaaaaatgagattttaacaatgtacctcaataatgcctactttggtcatggggtatggggagttcaagatgcggccaagcgttacttcaatgaaaacgccagtcagctaacggtaccccaagcagctaccctggccggaatgctgacgtcaccagggatgtacgacccagtagaacatccagcagcgacaaaacaacgacggaatatggttcttcagctgatggttgaaaatcataagctgagtcaaagtgcagcggatcaatataagcaaacaccgttgaatattaccaacggctacgtgccaaatgatagttataagtatccgtacttttttgatgcggtcattgccgaagccgaaagccgttatcatatttcagaaaaagatattatgaataacggttatcggatttatactaccctggatcaggatcagcagcggtcaatgcagcaaacttatgacgatgacgataacttcccgcagaactcagccgatgacacaatggttcaatcagcctcgattgcgatgaatccgaaaaatgggggaattaccgcggtcgttggtgggcgtggaaaacatgtcttccgtggatttaaccgttctacgcagatgcggcggcagcccgggtcaacgattaagccgattgttgtatatacaccagccctagagcatggatatttctatgattcaacgcttcaagataagaaacaatcgtatggaactaataattacacgccaaagaactatgatgatacctatagcgggacggtaccgatgtataaggccctttatgagagtcttaacgctccagcagtctggttattaaataagatcggggtcaatcgtggttatgatatggcaaagaagtttggtttgccagttgaaaagggtgataagaaccttgccttggccctcggtggtatgacccgcggagtatcaccgcaacaaatggctcgtgcctatgcagtctttgccaatgatgggttgatgccatcaccgcactacattaccaagattgaagatgcctctggaaaggtgatcgccaaaaatgatggtagcaagaataagcggatcatttctggtaagacagccaaagaaatgactagtatgctaattggcgtatttgatcacggaactggtgaaacggccaaaccaagtggatatacgcttgccggtaaaacagggaccacaaactcaggggtaaaaggcgatgattccaatgatcgtgataagtggatcgtaggttatacgcccgatgtagtggttgcaacatgggaaggctatgatgatacaaaccaaagccacaccctaaacgatatttctgaacggagcattaactacctttacaagaatgaaatgagtgcgattttgccaaatactgctggaaccaaattcacggttgaagatgctcaaacacgggcaaaagaaaagacaaagggttcctctaaaggatggggatcattcctcaaagatgagggcgactttgtaaataacttcaaccaatcagtaaataactttggtaataaggcaagtcaatggtggagcaatgttcgatcgcttttctaggataatatgatacaattaatctaagaatgagataaaggagacttttacatggttgtaaatatttatgatactgcaaatgaacttagtcgccaattgcgcgaaactcaagaatatcaaggattacaaaaggcttttgaagcattaaaggctgacagtgacacctttgacactttcaagaagttccaacaagctcaagcagatgctcaacacaagcaaatgactggtcaacaaccaactgatgatgaaattaaaaacatccaaaaccttgccaaggaagtaagtggcaagaaggttgttcaagacttgatgaaccaagaacggcaagttgatagcatgcttcaacaattgaataagacaattacaagtccaattcaagatctttacagtgaagtaatgccaaagatgccaggacaagaataattaatttattacgatccaagtgaggggctgggagaaagcaaaatttttctcagctcctttattgttaagaggaaaaattatgagatttattcatacagccgatttacaccttgatagtccttttttagggttgacttcgatgcccaagccgttatggaaacgcgtccactcatcgacgtttactgcttttcaaaagattgttgacgatgcgattgccttaaaagttgattttgttttaattagcggggatatttatgaccgtgatcagcaaagcattgccgctactgattttttcattaagcaatgtgaacgacttaatcaagcccacatccccgtttatctactttatggtaaccatgattaccaaattgtccaagacacgggagagctgccagcaaatgttcatgtttttggcaatcgcgtaatgaccaccactcttactttggcaaatcatgacagtgttgctatctcaggctttagttatgatcagcgctggattcaagaagatcaagtgcaaaaatatccatcaaaaagaaacgaaacctggcacatcgggatgcttcatggagcagtccggcaaagtcaaaataaccactatgctccgtttacgaccgatgaattaatcgctaaaaattatgattattgggcacttggtcatattcacaagcaccaattcttgaatgagaagccgccaattatttacagcggtaatccgcagggacggcataaaaatgaggccggacagcacggctattatttggtggaaagtcagggcaataaacttgtgccccaatttaaaccagttgcggaaattgaatggacaagtctaactatcaatgctttatcaactagtagtcttgttgaagtggagcaatccctggcgcaagcaattgatgacaaacttaaaaacgcacctttccaactggtagagctgacgattgctaacattgaacaactttccccaacgattcggcacctgcttgcaaatggggatgtccttgaacacctgcaggatcaaaatgcagataatggtaaatggtgggtctatgatctcttgctccaccagcaaaattcgttgccatcaatgactgacctagatgaacagtattggcaacaagccgcccaagaagtatttacccctgctaatattgcagaattaacaaaaagtttagcacgggatgccgatttagcagctaagttgacaacccttgatcttaagcaattaaagcaagcagcgactcaattattgcggcgggaggattagcatatgaaaataaaggaagtccgtatcgatggctttggcaaatggcatgaccaagattttgactttacagctaacccccaaataatttatggccctaatgaagccgggaagacaactctgatggcctttcttgttagtattttatttggctttgcggatgggcggggaaagaatcggtttgcccagtatattccgaagactacttctaattatggtggaagtttattagttgagatcaacggccatgattacgtgattaaacggcaacgcgggcggaatggcggtaaggttagtgtgactgattcacaaggacgtcaaggtggtgaacaagaactaaagcaactgcttggcccaatggatcggtcgctctatcaagccctttttagttttggtcaacgagacctaacagctgtggacgagcttaatcgggatgaatggcaacaacatctgcagcaattaggggcagttggtagtgcacagtgggaccagttgatcaatcagtaccagaaacaagctgaccatctctataaaccgcgcggacggaaatggccgctcaatcaagaccttcatcaatatgcaaatttgacagataaaattaaccaagcgcgtggtaaatttcactgttatcaggacctacaagcagatttgaagacaaacaaagcaaaattacggcaagcacaggcagaattgcaaaaacaacagccacttttgcaaaaattagcacatttacagcaattgtggccggtttactatgaatggcaaagtagccaccaaactcggccgcttgctgattatttaactgatcagcaggttacgatggctcaagaactacaagtgagagaaaaggaacttcgccgccaacaacaggtttatcaacagcgcttggcaaggatcgatcatcagtctccacaagcgcctaagcattcaccacaaagtatgccggaacttcaacgacttaaggagcaggtagttgaattacaagcggaagaggctttgcagcaccgtcaacaaacgcaagctaatcagtggcaacaggaattaactgcaattaaaactcgctaccaccatcccttgccagcgccattaacctcacaggaaaaagcagaacttgcccgccttcttaatgtccaaccgctttctcgggcaaatacgaaccagtcaaatggcgatccttctcgcgccgcaatgatcggaatcatcggcggctttgtcctttttatcattggattattagcgaatgccacttttattaccgctatcggagcaattgcggcctttgcgacagtgatgtatctttattatcaacgccaaggaagtcattctgctccagtaacgacagattcccaagcaatcacggcgtttggccaaaaacatggcttacaggattttccacttgatcaatggctattaatccagggagatttacaacgaaatgccgaattagctgcccagctccaaactgccaaacaagatcagcaaagatatgaccaccaacttgctatctttaaccaacaattgccaccagctttgcaaaatctaactttggcggctgttaggaataaattggatgatttactggaacaagggcaacaagcgcgccaggatatccaagcaaatacccgagaaaaagcaacgattgctaacaatttagcccagctcaatcaagactacagtaaaattcatcagcaaaaactggcgatttatcagcaagcaggggtgaacgatgataaccagtttacccagtacttagcaaatcgttctgcagcacaatcacaagccttggcatcagatgcctatggacaacaattgaccgcagaagaccgccaagcgcttgctgcatacgcaaatagagatgagctaatgacggctttagcgaagactcggtaccagcttgatcagctcaacctaacaatctctcatacccacgaagagattcaaaaagataaagtcgaaattgatagtttagttaaagatggaaccctcagcaatctggaacaagaacgggctaacctagccgctaagatttggcatgaagtacaggaatggttaaggtaccaattggcaattcagtggattaataaggccctggtaggagcttcagctgatcgttaccctgcaatcattcgccaggcagaacaatattttgccttgttaaccgctcatcgctattcccggatccgtttaacggccgatggagtcaaagtgatacgaagggatcaagaagtttttttagtggaagaattgtcgcagggaacggctgaacaattgtatattgcgctccggcttggctttgtcaccgtgatgagtgatcaagctaacttcccggtaattattgatgatgggtttgttaattttgataacgttcggcggcaacgaatgctggccttgctagaaaaaattgctgagaagaatcaggttatctattttactgctgatgatcggattaaggaccttgacgttaaaattcttgacctgcaagcattaaaccgtgaataaattatgaagatgatataaacatttatttaggagactggcacgaaaaaataagtgtggtatattggatgagtgaagttatcgaaaaaatattttgtttaaggatgtgtttcttacatgaaatccaaaaagttaattgctatcattgcaggggccgcattgatgatgccgcttgctgcctgtggaaataaagcagtcgctactactagcggcggtaaaatcactgagagcgaatactacagcagcatgaagcaaaccagtgctggtaagcaagtgcttcaacaaatgatcttagataaggttttggagaagcaatacggtaaagaagtcagtgataagcaagttaacgcgcaatataatacctacaagaacgagtacggttcagactttaatgcttatcttcaaagtcaaaacttaactgaaaagtcattgaagcaacaaattcggtcaaacttactcttgactgcggctgctcgtcattactcccacattactaacaagcaaatcaataagcaatggaccaagtaccaacctaaagttcaaactgcgacgatccttgttggtagtaagtctgatgctgaagatatcattaaccaattaaatgactccagcaacaagtacaagactttcaagaagcttgctaagtccaagtcaactgatagtcaaaccaagaacaacggtggtaagcttccagcctttgataatactgataaccaacttgattcagcttacaagaaggctgcctttaagttgaagacgggtgaatatactacgaccccagttaagactgatgacggctaccaagtaatttacatgatcgaacacccagctaagggtaagaagagtcaacacatcaatgacttgaagaaccaaatcgttcaagaaaacatgaacaaccaaaacttcatgcggaaggttgtttcaaacgtcttgaagaagggtaacgtttcaatcaaggaaaacgatgttaagaatatccttgatgactaccttaactcaagcgccactacaagcagctccagcaataacagcagcagtactagctcaaataagtaaaatagggtataaaaataaggctacggaaaattttcgtaaccttattttttatgtgcgcccggcatgggtattagctaggcggtgagagtccgctatgggccgtagtagtcggaaccatgagctgaggacaagggtgtccactgcgaggtggaatctgaaggaagtctaaggcaaagtactgcaccgatgaacaagaagtagctataaggctggaactaactggataagactgcatgacaagttaaagtccaacactactcgaagttactttcagtaaagctaccggtgacatggtacgaaagttaatatccttacccggggagatctggcctacacgtttccgacaagaggaataagtttaatttccacagaaacaagcggtgcagtgatgtagcgttgagtaagccagaagtcagccgaggtcatagtagtctgagtaatcagatgaaggactgaacgacaataacttgtaacttatatcggaggtgtaatcaggtgcgacaatcgcagaaaacagaacaacaagctgaccgcttgtcgaggataggtttggaaaaccgaaagtacacaagggcgcgtagtaccgattatggtgaaggtaaaggtatgagtgtcactatccaagacttagtcttggaccgcaataaccttaatcaggcttatttgcgagttaagagaaataaaggggcagcaggcattgacgatatgacagtcaatgaccttctgccatatctcagagaaaataagacggaattgatcgctagtttgcgtgagggcaagtataaaccagcaccagtcaaacgggtagaaattccgaagcctaatggtggagtaagaaaactcggaataccaacagtggtggaccgaatggttcaacaagctgtggcccaaattcttacacctatctttgagcgtgttttctctgataatagttttggcttccgccctcaccgtggggctcacgacgctattgcaaaagtagtagatctttataatcaaggttatcgaagagttgtcgacttagacctaaaagcctattttgataatgttaatcatgacttgatgattaagtatcttcaacaatatattgatgacccatggacactaaggctcattcgtaagtttctaactagcggagtcttagaccatgggcttttcgctaagagtgaaaaaggaaccccacaaggagggccattgtcaccaatactggcgaatatctatctaaatgagttggataaagagttgactagacgtggtcaccactttgtgcgctatgcggatgattgtaacatttatgttaaaagtcaacgagccggagaacgagtaatgcgaagcattacccagtttcttgaaaagcgattgaaagttaaagtgaacccagataaaaccaaagtcggtagcccgctacggttaaagtttcttggcttttcgttgggtgtagaccacaatggagcctacgcccgtccagcaaaacaatcgcaacaacgagtaaagaaagcattgaggttattaactaaacgtaatcgtggaatatccctgacaagaatgtttgaagaaattcatcgaaaaatgcgtggatggcttcagtactactcaattgggaaactaactgactttattcaacgccttgacaagtggttgagggcccgaataagacagtatatctggaagcaatggaagaagcttaaaactaaggtaactaacttacagaagctggggctgtcccagcgtgatgcatatgtcttcgctagtacccgcaagggctactggcgaactgcacacagtaagaccttgagctattctctaactaatagaaaactggaacaactcggacttatgaatatgtccaagacgctccagtcaattcaatgtgattaagttgtcgaaccgccgtatacggaaccgtacgtacggtggtgtgagaggtcgataattgaactaatcaattatctcctactcgatttccacttcttaacatcacgttcaacatcgttaataaatttttgcacaccagggatggcagcttgtagttcatcgatgctgttcttcaactgtgaaacttcgctgctgagccgtttgaattcctcttgaatttcttttagccgttgcataactagtcttctttcatttgatcgatgattgattgttggatttctttgtacttttcatcgttgtagttaccagaattgtccttaaaaatcatcttaaaatcatcatcgctagtgtaccgtggaatcaagtggaagtgggaatggaagacagattgataagcgacttcaccgttattgttaaccacgttcattcccttgatagctgggttagaagccttgactgcccgtgcaatcttggggatacgggaaaatacttgggcagcaagatcagcatcgtaggcaaataaatcgggaacgtgcttcttaggaatgacgagggtgtgaccaggagttccctgtgaaatatcaaggaaggcctttacaacgtcatcttcatagactgtgtagctaggaatctcaccgttaatgattttgcagaaaatacaattattgtccatattaatcgctccttttgaagattaaacttatcctaagtataccgaaaaaatcgcgttcgtgcatgatttagtagaagaaataacctatgatataataaaaagatatgactaagcaataattaagaagggatgaataatggctttagagataaataaacttgttggtggatattcccagattcctgtgttgaaggatgtcagctttgatgtccaaccaggtgaattagttggtttgattggactaaatggtgccggaaagtcaacaacgctaaaccacgttattggcttgctgcgaccattttcaggatcgattaaaattaatggtcttactatccaggccaacccggaagagtataaaaagcagatcgcctatgttcccgaaacgccaattctttatgatgaattgactctccgtgagcatatcgatttaacgattatggcatacgagcttgatcacgatgcagcatggcagcgggcaacaaaactattaaaactttttcggcttgataataaacttgactggttccccgctaacttttctaaggggatgaagcaaaaggtaatgatctgctgtgcctttatgactaaggccaagttgctgatcattgatgaaccattctatgggctagaccccttggcagtgcatgatttgctagacctgattgagcaaaagaagaaggagggcgtcgcggttttgatgtcgacccacgtccttgatacggcgcaacggtattgtgaccgctttgtcctattggcagatgggaaagtccgggcacatggaaccctcgatgaattacgagccgctggtgatcatgccggcgaatccttggatgagatttacttgcatcttgcaaagggtgatcgtgatgaataagttatttagcaagcgtcgcagtcaacactttatgctcctgttgcgttactggcggctagtcttcaatgaccactttgttatcgccttatttttcctgttcggagctttggcatatggctattctcaatggctgccaaccttgggatcgcatgaatggtggacccggctgatcttgatcggctggtttacggtcatcgctcaaattggtcgtcttgcaacgctgatcaaaaagccggacccagtctttctcttgccgcaagttgaaggaatccatcgttaccttaaccaggcgacctggtatagtctgatcttagcggaaataatgacggtagtgggggcctttatcgccttgccgttcgctttaacaacggaaaaactcagcagtgccgagattgtgaccatctttttagtcaccattgtcaataaggctgattggatgcatgtagctcgtaaatcactgagtttgcgctggggtgatcaacagtggcggacccggctagaatactgggtaaatccgctccttgcttcaatcgcaatgtggctggtaaatccctatgtcggtcttgtcgtggcagtgatcttgtacttggcggtaattgtttattatcgtgatcttgccgttaattggcggattgccgttaaggcggaacaagatcggatgtatagtgtctaccgtttctttaacctctttactgatgtgccaagtgttcaaggaaataccaaacggcggaagtgggcagatggcttgatccgctggctaagcaaagatggtcaaccatggtcttacttatacgctcgcgcatttgtccggagtaccgaagtgagcgggattgtcagtcggttgaccctactaggaatggtgattgtcttcttactgccagcaggttggttaagtactctggtggtcgtgctctttatttacttgatcgcgacccaactgatgccactctatgaccagtatgaatcaaatgtctttactcacatctatccaatccctgctagtcagcaacaggcagactttaagcagctgttggccaaggtaacggcgcttgaggcactattgatcgcccttgctagtatcggttggcagttgaatgtcggccagatggtaattaatcttattattgcggcagtggaagtggtcttattaagccgtttctacttcaatgtcagagtcaaaaaactaatgaaatgaggattttaatttatgcgtgtgaaacataaaaagtgggctgatccattaattgctgcccatccagaactaatgattgatgatgccactcaatttaagggtaagtggcaatcacggtttgcaaaagaacaacccctccacttagaagttgggatggggaaaggtcaatttatcattggcatggcgaaggctcatccagaaatcaactttatcggattagagattcagcggactgttgcggcaattgccctcaaaaaagcacttgaggaagacttgccaaacttgcaattgatttgtggggatggagaagacttgcaagaatactttgaagatggggaagttgcgaagatgtaccttaacttctctgatccatggccgaagaaacgccatgctaagcggcgcctgacctacaagaccttcttagcaacctatcagcagatcctccaagatcaaggggtaattgaactgaagactgataacatgggtctctttgaattctccttggaaagcatgaataactatgggatgatctttgatggcgtctggttagacctgcaccacagcgaagaaaatgaacataatgttgagacggaatatgaacaaaaatttgcggcgaaaggccaaccaatctataagctaattgctaattttaagtaaaatactagtcagtaagtagacgaatgcttgctgactagtatttttttacttttttgctggggtgaggaatcgatttctttatagcaacaccaagtgaaaaagtgtatttaaaagtaatcccaccattaatgaaataataattttgtgtttatggttcgataaatatgtgctcgaatattttcgaaatataaataacaagttatgacgtacaaatatatggggggatattgaatgtcgaagaacaatgcacaagaatatgtacgcaaaatggagcaacaacggcaacgatttgggttaagaaaactcagtgttggtgttgcgtctgtgttactaggaactacttttatggtcggaggtacagtagcacacgctgatagcacacctactatggaagaagcaacaacagcaaataccgatattacgcagctggtttctacttctgttgtacaagctgataaacaaactaatgaggaacaaaacgcagccgaaaatactagtagtaattcacaaaaagaacaacaattaataaataaaacaagtgatgagagcacagatcaactgaataataaaaagaatcaagaactggtaaaggataacgagtatgaatcgattactaatttaaacaaaaataacgtcaatacacaaaatactccagttgaagaaagtaaggtttctcaatctgctaccgaacagaatgcaagaattgatttaacgtttgttgatgatgacgataacggaaagatagtagattattcagaatatttgccaagcgaagataatggtcatcattatgcatacggtaaagttggcgataaggttagtccgaaagcatacaataaataacggtacgatgatgacgtgtacccccagagttggaaatcaactctgggggtattttatatgaccaaaattagcgttaaaactaaacttaaagctgttgaagaatatgctaacggtaatgttgctttagcatcagttaggcataaatacgggattgctgaacatgatttccaaatttgggtgggaatttatgcaagatttggtaaaggaccattactcaatccacccaaagtaactggggattttcggttaaatctggtaaagtggaaacaagaaaatttggcgtcaatctcagaaacttgtattcactttggatatcgttccccaggttcagtgtatcagtgggaatgtctctataacaagcaagggccacaggctttactgagattgcgtcggggaaggaaacctaaaaatggtcaaacgacacgacaagaatcaagacaagcttcttcagctccaaaaacagaaccaaaccttacaaagagaaaacttattgttaaagatacaactcgatgcctccaaaaaattgacagccttgagaaagcatccaaaaaagaactcgcacaagtaatttatgacctcaaggctaaatacttattaaaggatttgatcgatgcacttcccatttccatgtcaacctatcagtattggcaaaatcggtttgaacatccggatgaggatgaagaagaacttaaagccgttattaaaggcctctttaactactaccaagctgaatacggcgtacgccgtttaagcactcaaattcgagactactatcgcttaattggtaaaaagacacctaatcataagcgcattcagcgcttaatgcatgaaatgggacttaaatgtatcaaatataatcggcgagtccgtaagtatgattcctctaagggaccaaatggcaagaaagctaagaataagctaaatcggcgttttatgagtaaccgtaaatatcagaaaatggtttgtgacattacagaattaaaggctcatgatgggcgaaaagtgtacttagaaattattaaggacttggcaactaaccagattcttacttggtcaatcagtcaacatccaaatcttcaattcgcattagatccactccagcaattacttaagcagttacctcatacaggataccaattaattttacatactgatcaaggctggcactatcaacatcgtgcttggcgcaaactacttcgtcagggaaacattaggcaaagcatgtcgcatcgagcaacctgtctggacaacgctgcctgtgaaacagtctttagtaaactgaaagcagaaattggtcctgataccagttatcgcaatcaagaagaattaagccaagcaattaatgaatggattcacttttacaacgaacgccgtattcagacaaaactaggcaaccaaactccacttcaatatgagcagaatctagttgcctagaaaaatatttattcaattttaaagcaagaacatacaggttccaactttaagggtacacgtcaatttttttattatttaatgtgtaaacttgacagggcacagtaccgcgcctgcttctaattttttatcatttgtgacgtcaaaaaggtaaacgccaagttaataaggatcaacttttgctaaagcgggaatatatgtcgctacctgtccttcgccaattttgctccaacattcttgaattgcgtcattaagattcatgatagttctcctttaattaaaaaagctgggaaaatttgtccccagcctttactttagttattctcaatccgttttaattctaatagactaccagtatatgcatcagcaataaactcgtaatctacttcttcgccatcttctagacgagaaacgccgccttcataagcatgggttttaaccgcaaatcgttgaaaaggtattgctttatcattgatccagctaccggttaaagaaccttcacttgcaaaatcgtttttgactaattttaagatccgatcagcagatatttggcggttaccaaaaagtttaccagcgataaaaccggcgattccagatgcacctaatgtgactggaatcagccaggggttgagggagttattgtttgcattcatatgattgcttccttcactatttaaatttaatccgttcttaacttctcatttattctatcatttttaattattaaaatccaaatatctagtccttgcaagcagagtacttacaatagataagaagcatggtataatattgctaaaatgatatagggatgaggattatgaaaagattaccacaattaaaagaagatcaattaattgaaactattggcaatggcaaggtcgtccttttctttacagctgattggtgcccagattgccgtttcattaagccagcaatgcctgagatcgaacaagacttcagtgattatactttctatgaagttgatcgcgatgaaaacatcgacctagctgctgaattaaatgtatttggaattccaagcttcattgtatatgataatggtaaagaaattggtcgatttgtcaataaagatcgtaaaactaagcaacaagttgaagattttttaaacaatttgaagtaaaataagaaggctgtgaaaataaagagactgaattattcagccttctttagttttaaattagattttcatagtcttctttttatgtaataatataaaatggtagattatattagagagaggaatatttgatgttaatttcaagttacaatcccaatgaattaggcgacattttagtcgttattaccgctccagatgcggatgaccaaattactaagattgctgatgatgtagctcagatcaccgctgaaaaagatggtgcattacttggctataactttatgaacgccagcaagatcttaccagaattaacaagtgaaaacgggcaagtatttttagatgcagcccaagttgaaaaattaaatgcaaagttacaagaagcgggctttgataagctcttaacggctgacgaagatcctaagtttgtggttggttatgttgaaaagatcactgaccatcctaagtctgaccacttaaaagtaacgcaaacgcggattgctgatgataagactgtccaaatcgtgtgcggatctcctaatgttgcggaaggtattaaagtggtagtcgctcgtcctggtgcgatgatgccagacggtaagatcatttggcctggtcaattgatgggtgtcgatagtgacggaatgctctgtggtttccgtgaactacggattaagaatgctcccgatgaaaagggcctattcattatccctgatgactggcaagaagtcggtgaaccggttgattttgctaaggccgatacgttttacccagaaaactaacaaaaaacagctgattactattgccaaaattttataatgctttattatttagtgagggatggatcatagttactgatctacccctcgcatttattttaaattgaattgttgaaaggaattggattgatggaacaaaatacatattactttgttggtattaaagggaccgggatggcctctttagcacgtatccttcatgacaaaggacaccaagtactaggttcagatattgaaaaggaaacatttacacaagcgccattattagcggcgggaattaaaattttgccatttgatccagccaatttgaaaccagggatgattgttatccaaggaaacgcttttgatgatgatcacccagagattaaacgagcacatgaattaggccttaaaattttaagctaccctgaggctgttgaaaatgaggttaagaatcatactagtattgggattgccggagcacacggtaagaccagtacgactgcattgttatcacacgtattagcagcggttgaaccaaccagctacttgatcggtgatggggtaggtaaaggaaatgcggatgcacgcttctttgtttttgaagccgatgaataccgtgatcacttccttgcctaccacccagactatgcaattatgacgaacgttgactttgatcaccctgattacttcaatgatttggcagatgtccgtgattcatttgaaacgtacggtaagcaggttcaacgggcaatttttgcttggggagatgatcctagtcttcgtaacttaaacgttgatgttccggtttactactatggaactaatccagatgatgatttccgggcagaaaatattcaacggacaccagaaggctcaacatatgatgcttacttccgcgaccaaaaactcggcacattcactatccacttatacggtgaacacagtgttcttaatagcttagcagtactagcagttgcatacatggaacacatgaacatggatgagattcaacaggaattagccaactttagtggggtaaagcgccgtttcagcgagactgacattgcggatataaccattattgatgactatgctcaccatccaagcgaaattaaagcaacaattgatgcggcacggcaaaagtatccagatcgtgaagttatcgctgtttttcaaccacacacatactcacggttggctgcttacatcgatggctttgcagaatcgcttagccgggcagataagacttttgttaccccaatctttggttcaattcgtgaaaatgctggaaatgtttctagtgctgatttggagcaacggattgacggtagtgaaggcattgacatggataccatggataaacttttgcaataccataatgcagtagttgttttcatgggtgccggtgatgttgaaaagtacgaagaaaagtacaaagaattgttaaaataattaaagatttacttgaacgaaatggtggcctctgctaccatttttataattagtcaaataaagtcaaattaaatagaaagagggagttttgatgaataacttttctcaagaaccagggcgtcgggttgtcactgacgcagctggcttgaatagtttcttgacccgaatgtatggaaacatgacgctggcagttcttgtttctgcattcagtgcttacttgaccatgggggtattccggagtgcggttttcggtttctttagtgctcaccctggaatggtttgggttatcttattgctaccgattgctttgtcaatgggggtaagctttagtgctacccggaacccagttggggcatttattatgctgatgctgacggcaataatctatggtgtcgagtttgcaattattgctggtgtttattcgggagcaagcattgcctcagctttcgtatcatccgcagccgtttttgtcacgatggctttgtatgggaccattactaaacgcgacttaagtaagtttggtgctcacgcgatggctgccttgattgctttaatgattgcttaccttatcaacatgttcttacaaagtcctgccattgcttacatcttctcctttatcgctgttattatctttactgttttaacagcttgggatgcacaaaagatgaagcaaatctacatcaactatggtggcgaagtatcaacaaatggtttagctgttctaggtgcccttcaattgtacttagactttgtaaacctctttatctcacttctccaaatttttggaatgagtgaccgaaattaattaaaagtgagtgttttgcacgttatcttgttattatattgcaaaatagtaagaggctgttgaaaaacaaaagtttttctcagcctctttactatatttaaaaactacttattaacgtttttccttttagttaaataataagaactatcagttacgagaatcaagaacgttgcgatccagatagttttcattcggaaaaagggaagcaactgagcggaaatgatcgcgccgagcgtaaaacagatcacgatcattaaataactaaaggccactgagcgttgcgagcgatcgtgatgaaaataatattcgctccaggcaaccgcagcttttttaacactgccacttgtaaagacactgttatacccaagcccctcgattttgctgaaagcggcactttgcattgcaagcccaaatgaaacagctggtaccattagataatcaggaaagctgtcaggaagaaaaccgataattgctcctactaataaaattggcaataaacaaactactcgccaataatcagtttttaaatgagcatggagaatactaaccattgctaatccaacaataaatgcgatcaatgaacctagccgatcaaccacgccaaggaaattgtggtttgcgagcgcagcgctaagaaaaatgatattaccggtttgggccgccgccattgttcgcccacatttgatatatgtaaaagcgtcgatgaaaccaccactaaaggtgagaaggagggcaaagagccgtgcttctgctggcttttgatagttaatgagtttatccatgaatttcatctcgcatctaatgtttttcattttaattataacttaaatctttggtcaagaaactaaaccattgctatattctctggtacaattactattagcgatagaagggcgggaattaaatgacaaaacaattattgttaattgacggaaatagtattgttttccgggcattttttgccatgcataaccaaatggacaagtttacaaataaggacggcttgcatacggctgcaatttatggctttaagttgatgcttgaccatgtgttgcaaaactttaaaccggatacggctttagtagcctttgatgcagggaaggtaaccttccggacgaaaatgtatgatgactataagggtggtcgaaacaagacgcctaatgaattgaccgagcaaatcccttatgtgcgtgaattgatcaaagactctgggttacatagttatgaattagctaactatgaggctgacgatattatcggtactttggctaagcaggcggatgatgctggctacaagacgttgatcgtaactggagatcgggaccttacccagttagcaagtgaaaatacaaccgttgccgttacccacaagggagttactgacacggaacactatacgccagcgcatgtcgaagaaaaattaggaattaccccacgccaaataattgatatgaaggcattgatgggtgattcttccgataattatcctggtgtaactaaaattggagaaaagacggcgatcaaacttgtgaaacagtttggttcggttgaagagctttatgaccatattgatgacctcaaaaagagtaagatgaaagaacatttgattgaggatgaagagattgctcgccaatgtaagacgttagcgacaattcttcgggatgctccgctcaagattggcctagatgatttgcaataccaaggtccacaaacggatgacttgattaagttttacaaagagatgggctttaaatctttcttgaaaaagatggatatcgatggggctggagaggaagacgaagctgagattgctccaattgactacacagttttaactaaagataacttagatgaactaggacaattaacgggtgaagtaagtttttaccttgaaatgccagcagaaaattaccacacgtcaccattcgctggttttgtgatcggcaatgaaggacactggtttacgagtcgagatgtggacctgcttaaagaggcgcctctcaaggatttactccagagtgatagtgttaagaagaatgtctttaatgccaaggcacaaatcgttggacttcatcgcctcggtattccgcttgaaaatattaattttgatctgcttttggcatcttaccttctaaatactaatgacaatagtaacgacctgggacaagtagctcaggaacacggttatgatgatgtacgaacagatgaggaagtttatggtaaaggtgctaagcgtgctgtgcctgatgatgacgagaccttctttagtcacctggctacgaaagcgcgggcaattgaacatctgcgtaaggatttttttgccaaattagatgaaaataagcaaacgccgctatataccgatattgaattaccgctaacccgggttcttgcaaaaatggaaatcgcgggtgtccatgtagatgcacaaactttgaaagatatgggtagtaaattaactgaacggctatcagaaattgaaagtcagatctatcaagaagctggcgaggaatttaacattaactccactaagcaactaggccatattctgttcgaaaaattgaaattgccagtgatcaaaaagaccaagaccggttattccactgcagttgatgtgctggaaaagttagctgataagtcaccgattgttgagcaaattttggaatatcgtcaaattgctaagcttcaatctacctatatcactggtttgctgaaagttatccattcaaatgaccagaagatccatacgcgctacttacagacattaacgcaaactggtcgcttgtcttctgttgatcctaacctgcaaaatattccagtacggttgccggaagggcgcttaatcagaaaggcatttgttcctagtcatgaaggttggcaaatcttctcttcagattattcgcaagttgaattacgggttcttgctcacatcactggtgacaagaaccttcaggaagactttaagaatggtgaagatattcatgctagtacagctcgccgaattttccatctagcccctgatgccgagattgaccgtaatatgcggcgtcgggcaaaagcagttaattttggaattgtttacgggattagtgattacggactggcacaacggattcatgttagtcgtgcagaagctcatgaatttattcaaaattatttccatgaattccccggtgtaaagaaatacatcaatgacacaattgcgtttgctaaagaaaatggttatgttgagacgattactcaccgtcgtcgttacttaccagatattcatgccaaaagttttagcaagcgatcatttgcagagcggactgcaatgaatacgccaattcaggggagcgctgctgatatcattaagattgcgatgatccggatgcaagatgagcttgagaaacgccatctaaaggcaaaaatgctcttgcagattcatgatgagttagtctttgaggctccaaaggaagaaatcccgattctatcggaattggtgccaaaagtaatggattcggccgttaagttggatgtgccacttaaagtagatagtaagtatggggatacctggtatgaccttaaaaaatagatcggaggaattaaatgcctgaattaccagaagttgaaactgttcgccacggtttgctgaagattgccgctaagcgtaaaattaacgcgatcgatgtttattatggtaaaacgattaccaatgacgttgaagattttcggcaggcgttgattggacagacgattgaaaatgttgatcggcgagggaaatatcttctttttcgttttactaatgatttgacgatgatttcacaccttcgcatggaaggaaaatattacaaccaaccgattggcggaccaattgataaacatacccatgttgtctttgaatttacggacggcacggaattatgttatcaagatacccgtaaatttggtcggatgacactggtaaaaaccggtgatgagatgaatgtcggcggattgaagacgattggccctgaaccgacggaagacgcctttacgttgccatactttacagctgaattaaaaaagagtcggggaaagattaagccattcttgcttaatcagcgtcatgtcgccggtctgggtaacatttacgttgatgaggtactatggatgacggggataaatccggagcaaccagccaatactttaacggctagccagattactgaattacggaaaaatattatcaaagaattggcgacagcgattaagtacaagggaaccactgtgcatagttttacgaatgcatttggtgatgccggcgctttccaagatcgcttaaaagcttatggtcatgcgggggatgaatgtccgcgttgtggcacgaaaatggttaaaattaaggttgctgaacgtggaacgacattttgtccacactgtcaagtattgaaggaataagaaatgacaaaaatagttggattaacaggtggaatcgcaaccggcaagacaacggtaagcactattttgcgccaggctgggattccggtgattgatgctgaccaagtagcgcggcaagtccagacaccagactcggttgggttaacacggattgtcaaagtatttggtccgaaagtacttttgccaactggggagctcaatcggcaaaccttagcaaaaattgtctttaatgataaagaagcgttgaaaaaactcaatgagattcttcagccattaatttacgatgctatctttgcgcaggttaatactttaaaaaaacagggtattccgctcgtggtgttagatgtaccattattattcgagcaacattatgatgaagattgtgattatgtggtagttgtttatactgatccacaaacgcagcttaagcggttaatggctcgtgatcattgttctaaagaggaagcgcaagcgcgaattgttgcccaaatgccattatcagataaagaagcgcgggcggattttaaaataaataataatggtgaccaggctgccctgcaaaaacgagtcgcatccctaataaatcagctaaaagcagagtaaatgtggtaaaataaagtacttatactataaaggagggggacacattgcgctgtccacattgtcacaaaaatggatcacgggttgtcgatagtcggccaagcgaagacggaagctttattcgtcgtcgtcgtgagtgcattcattgtggctttcgttttacaacctttgaacggtacgaggaaacgccactactagtaattaaaaaagatggcacgcgccaagaattcagtcgccaaaagatcctcaatgggattgtgcgctcggcagaaaaacgaccggttagtatggagcgattgaccaagattgcagataaagtggaaaaacaaatccggagtattggtgaaagcgaagtctccagtcaaattattggtaaatttgtgatgaacgaattaaaaggcgtcgatgagattgcttatattcggtttgcaagtgtttaccgccaatttaaggacgttgatgcctttatgagcgaacttgaaaccatgatgaaggcagaacataaaaaataacttaggagggctgtaaaatgactgcagcagcttttgacccgcaagccggttatgttgttacggccagcactgcatttattagttttaatgaccagacttttgcaacattttatcagccaattttaggaccagttgcgtttagctttttttatgcgttaaaagcgcgcttgctgcctaatcctacgattgctaaccggaccttgcaaagtgacctgttagcccaagtaaatgctgggggccgacaagtactggaggctcttcatcgtttagaggcagttggcttagtgcaaacttatttccagcacgatgagatcggggacgtatacgtttatgaattgcagccgacccttactccagaaaaatttttagctgataacttgctgagtattttacttttagaggaagtaggagaagatgcgtttggacgtttgactaagcaaagtaggcaatacaagcttgcttcttctaatacttcactaactaatgtgagtcacaacttttttgaagaatttcatattaactcgcagtcaattactgaaacaccacaagcgattttaacggcgcgaaaacaggcaccagtagaaaagcaaccccagttaactgcggggataagcgatgactttgattggtcaaccctcattcacttgctggctaatcagccgattgtcagtgcagaccttgaaaataatcgagacctaatattattagaacatcaattatatgggattgatgcgccaacgatgaagacattggttttgcggtcgattgatctgcaaaccaatcatttcaatccgaaaaaatttaagcaaattgttgcgtctacctataatattgtctattcttcaacgacaaaagtagcggaaaaagaagcgccggtgacaaatagaaatagtgaactgactagtaaagatcaggagttattggcgacagctaaggattactccccagtcgaatttcttcaggttcttaaaggtcaaacgggtggctacgtaacttcaggtgaacgtcatattctgacaggtttagtagcgcaagaaaaacttacccaagatgccattaatatcttaacttggtatgtgattagtgaccggggaaattctactttgacagctaattttgtcgatgcaattgccaataactggctccaacatggagtaattaatggggaacaagccattgtccaattaaagacttttaacaagcagtcgcaagaaaagaaaaaggaaacaaagacgccaaagaaaaataagtggcgcaaaacgattaaggaaccgatgccagcatggagcaagaaagacacgagtgagttgatgaaaaaggcttcctcacaagaaattgccaaactgcgtgaacggatcgctaatcgtaagaagaagtagcagctaaaggaggtggcagcatgcagtcactaaacaaaactttacaagagttaatgcgcggtcaaaatatagcaaacaatatccaacaaacgatgaagcaagtttatgcggataaagatgttcaagcattcttaaacgaaaatcgtgaccgtcttagtaaagaagcaattaaacggggacaatcaaagctttatgagttttttcatgaaaagcaattaattgaaaaaggcgtgccaactgttgcccctggatattctccgcaattggttatcagtgcaggccaaattgacgtaacctacgttccaactaaacagttattagaacgccaacgacaacgttatattcaacgactagttaactcgattaatatgcctaagttcattaaaaatgcgtcatatgatgattattatttaaatgaagatacccaaactgatacacgcacaaaggcaattcaagcagccatggactttacagataattaccaaaaagataattttcaaccaggactttacctatatggaaaattcggagtcggaaaaacatacctccttggagcaatcgctaatgaactcgctaagagtaagggagttgcaacaacgatggttcatttccctagttttgctgttgaaatgcggaattcaattaagcaaaataatactggcgaaaaattggatgctattaaacgggcgccgattttaatgcttgatgatgttggggccggtgcaatgacaacatgggtaagagatgatattttaggagtaattttagaatatcggatgcaagaagaattaccaactttctttagttctaatttttcaatggatgagttgcaaaataaccaccttgctatcaatgcgcaaggcgataatgagcccctcaaagcggctcgcattatggaaagaatcaagtacttatcacgtgagattgaaatggaaggaaagaatttgcgtgataagggataaagttcttgacattaaactttgaatttagtaagctaataaacgttgaaagaaaaagcagaagcacccgcttctcgcctaggtgatattgatcgccgggctgacgagatgaatgataatcgaccactatgataaggtcgttgttatgaagcggggtacttttgtacctcgcttttttgcttgatctttcgctaaaaaaattggaggtgcgttgccatagcacaagatatgattgtcaataacggtattcgtgcacgggaagtgcggttaatcggtcaagatggtgaacaattgggcattaagtctaagcgtgaagcgctacaattagctgaagaagctaacttagatctagtattagttgcaccaaaggcacgcccagctgttgcccgcattatggattacgggaagtaccgtttcgagatgcaaaagaaagagcgtgaagctcgtaagaagcaaaagacgataacggttaaggaaattcgccttagtccatcaattgatactaatgactttaatgttaagttaaagcgtgttcgtaagttcattgaaaagggcgataaggtacggatttcattacggttccgtggtcgtgctattacccataaggatatcggtcgtgacatgattgaacgaatggctgaagaaacttcagacatcgctactgttgttcaacgtccgaagatggaagggcggagtattttcttaactcttgctccggctgctgataaagcaaagaattaatttaagaaggtaggaattagttatgccaaagatgaagagtaaccgtgctgctgccaagcgtttcaagcgtacagctaatggtggattcaagagtggaaactcattcactagtcaccgtttccacggtaagactaagaagcaacgtcgtcaattacgtggtttgagcatgatggacaagaccaacgtaaagcgttacaagaagttattaccatttaagtaaacttcacaaaaataactatttaatatacgtaggaggatttcaacatgcgagttaaaggtggaactgttacgcgtgcacgtcgcaagcgcattatgaagttagcaaagggttaccgtggttcaaagcaccgtcttttcaagactgctaaagaccaagtaatgaagagttacacttacgctttccgtgatcgtaaggtcaacaagcgtaagttccgtgaactttggattgctcggattaacgctgctgcacgtatgaacgacattagttacagcaagttaatgcacggcttaaaggttgctaacattgatattaaccgtaagatgttagctgatttagctgttaacgatgcagatgcatttaaggcactcgttgacgaagctaagaaagctcttaactaagcctaaataatcttcggtcgcttatgatgcgtatgcatgataagcggctttttttagtgcgcccggcatgggtattagctaggtggtgaaagtccgctatgggccgtagtagtcggaaccatgagctaaggacaagggtgtccaccgtgaggtggaatctgaaggaagtctaaggcaaagtactgcatcgatgaacaagaagtagctataaggctgaaattaactggataaggctgctagacaagttgaagtccaatactactcgaagttggtctcagtaaagctaacgatgacatggtacgaaagctaatattcttacccggggagatctggcctacacgtttccgacaagaggaataagtttaatttccgcagaaacaagcggtgcagtgatgcagtgttgagtaagccagaagtcagccgaggtcatagtagtttgaataatcatatgaaggactgaacgacaataacttgtaacttatatcggaggtgtaatcaggtgcgacaatcgcagaaaacagaacaacaagctgaccgcttgtcgaggataggtttggaaaaccgaaagtacacaagggcgcgtagtaccggttatggtgaaggtaaaggcatgagtgtcacgatccaagacttagtcttggatcgcaataaccttaatcaggcttatttgcgagttaagagaaataaaaggagcagcaggcgttgacgatatgacagtcaatgaccttctgccatatctcagagaaaataagacggaactgatcgctagtttgcgtgagggcaagtataaaccagccccagtcaaacgggtagaaattccgaagcctaatggtggagtaagaagacttggaataccaacggtggtagaccgaatggttcaacaagctgtagcccaaattcttacgcctatctttgagcgtgttttctctgataatagctttggctttcgtccccaccgtggggcccatgacgctattgcaaaagtagtagatctttaaaatcaaggttatcgaagagttgtcaacttagacctaaaagcctattttgataacgttaatcatgacttgatgattaagtatcttcaacaatatattgatgacccatggacactaagactcattcgtaagtttctaactagcggagtcttagaccatgggcttttcgctaagagtgaaaaaggaaccccacaaggagggccattgtcaccactactggcgaacatctatctaaatgagttggacaaagagttgactagacgtggtcatcactttgtgcgctatgcggatgattgtaacatctatgttaaaagtcaacgagccggagaacgagtaatgcgaagcattacccagtttctagaaaagcgcttgaaagttaaattgaacccagataaaaccaaagtcggtagccctctacggttgaagtttattggcttttcgttgggtgtagaccacaatggggcctacgcccgtccagctaaacaatcgcaacaacgagtaaagaaagcgctgaagttattaactaaacgtaatcgtggaatatctctgacaagaatgtttgaagaaattcatcgaaaaatgcgtgggtggcttcagtactactcaattgggaaactaactaactttattcaacgcctcgacaagtagttgagggtccgaataaggcagtatatctggaagcaatggaaaaagtttaaaactaaggtaactaacttacagaagttggggctgtcccagcgtgatgcatatgtcttcgctagtacccgcaagggctactggcgaactgcacatagtaaggccttgagctattctctaactaatagaaaactggaacaacttggacttatgaatatgtccaagacgctccagtcaattcaatgtgattaagttgtcgaatcgccgtatacggaaccgtacgtacggtgatgtgagaggtcgataatcgaactaatcaattatctcctactcgatttagttgctttccgagtaaagcacacgatataattaaatactagaacatttaatcgggttaaccgattggaatattaaatttgatgaggtgcaactttgttagagatatttaaaccaacatggatggttaatacaatatattctgtttctcctgcccaattaaaagagcagggagtgcgagctgtttttagtgacctggataataccttgattgcttggaacaatccagatggaactccagaattaaaggaatggatggattctttacgagaagcccatattccgctaattgttatttctaataatagtaaggaacgagttgggaaagctgttaatagccttgaccttccatttgtttcgcgatcattaaagcccttaagttttgggattgatcgtgcacggaaaaaacttaatttagcaaaagatgaagtggttatggttggtgaccagttattgactgatgttgctgcggctaaccaagcgggcattcgaagcattttagtacgccccctattaaatacagataagtgggatacccgtattaaccgcttctttgaacgccgtgtttggaagagcttaaacaaaaaatatccagatttaaaatggcaggaggatttgaatgactgaacaagaacaacaaactgaagaattacgttgtataggttgtgggagtattatccaaacggaagatcctaatggcttgggttatacgcctaagtcagcccttgagaagggaaaggagacaggagaattatactgtcagcgttgtttccgcttgcggcactacaatgaaattgctccggtatcattaacggatgatgactttttgcgcctattaaatcagattcgggatgccaatgctttaattgtgtatgttgttgatgtttttgactttaatggaagtctaattccgggcttacatcgttttgttggtgataatccagtattattagttggaaataaggaagacttgttgccacgttctctacggcggcccaagttaactgactggattcgtcaacaggcaaatattgccggattgcgtccaattgatacggttcttgtttcagctaaaaagaaccatcagattgaccacttgcttgatgtgattgaaaaataccggcacaatcgagatgtttatgttgtaggtgttacaaatgttggaaaatcaacgttaataaaccaaattatcaagcaacgaacgggagtaaaagaattgatcactacttcacgcttcccaggaactactcttgataagattgaaattccgcttgatgatgggcatgttttagttgatactcctggaattatccatcaagaacaaatggcccatgtcttatcgccaaaagacttgaagattgtggcacctcaaaaagagattaaaccaaagacttaccaattaaatgatggtcaaacattatttttaggcggcgttgcgcgatttgattatcttcatggtgaacgtgcgggaatggttgcttactttgataataatttaccaattcaccgtacaaagctaagcaatgctgataatttttatgctaaacacttaggagatttgcttaccccaccgactagcgatgaaaaggatgggttcccaccattagaacgttatgagttccacattaccgaaaaaagcgatattgtctttgaaggtctaggatggattactgttcctgcgaaaacgactgttgctgcatgggttccgaaaggtgtcggggctcttgtacggcgcgcaatgatttaattagtatttgaaaggaaagacttatgcaattaagaggaaaacaaaaacgatttttacgagcacaagcaaaccatcttcaaccactattttctgtgggtaaagatggtctgacggacaattggcttgctcaattagacggcgcacttgaccgtcgagaattaattaaggttagcattttgcaaaactcagatgttacaactgatgaagttcgcgaattaattgaagaaaaaacttctattcaggtagttcaagttattggtcgggtattagttttatttaaagtttcagcaaataaggatgcccgtgaattatcatcacgagtagctgaaatctaagtaaaagtaggagtgacggttttgcaaagctgtagtgtagtagacaaggtgcaaacccaggcgcaaccggagactaaagttagtggacaccgtaagcggatcggcctctatgggggaacatttaatcctattcacaatgctcacctatttatggcggatcaggttggtcatgccctttgtcttgatcgagttgattttttaccagatgctaaacctccccatgttgatcataaagattcgcttgatccgcaattgcggttacagatgctcgaattagcagttgctgataacccctttttagggattgagtataccgagttagagcggggaggagtcagctatacttacgatactattaagtatttgttagataagcaccctaatgtggattattactttattattggtggggatatggtcgattaccttgacaagtggtatcggatcaatgatttaatccgcttaccccatttccattttgtcggtgttcaccgtcaaggagcgaagaatgagacacgatatccagtgatttgggtagatgtcccaacagttgattttagttcaaccgatattcgacaacgggtgcaacgtggccaatcaatcaagtatatggtcccagatgccgtaagcaagtttattgaggagcatcaattatatcgtgaatgaagaattagtttataataaaagttatatcccaatgacacggtctgaacttatcgaccgtctcaaaaaggcgttaaagaataaacgatttcagcatgtattacgtgttgagaaaacagcgattgagttagctgctcaatacggtgttgatattgaaaaagcaagtatcgctggcctgtgtcatgattatgctaaacagcgtcctgacgaagattttattgccgaaattaagaaaaaagggcttaatccgctgctcttagattatggtaatgcaatttggcatggagtggttggcgcagagctaattaaggatgaattagggatttgggatgaagatatcctaaatgcagttcgccaccatactactggagcgccagtaatgacgaagctcgagcaggttatttacatggctgactatattgagccgggtcgtgactttgccggcgtaaaaaaggcacgagtaattacagcagcaaaccttcaagcaggagttgcttaccaaacaaaacatacgctggcttatttgattgaaaatggaaagccggtatatccaaagacaatagatacctataatgcatgggttccgcaatatgaaggagagatagattaatggatagtaaacaattattagaaatggttgtcaaggctgccgatggtcggcgcgcagaagatatcgtcgctcttaaagttgatgaaattagtccaatggctgattatttcgttattatgacgggaggctcagaccgtcaagtacaggcgattacgaatgccattgttgaaaaagcgcatgaagaaaatgtcaaaattggtagcgttgaaggtaaaaatcatgctcaatgggtattggttgaccttggtgacgtggttgtccatgttttccgtgaagaaacccgtcaattctataaccttgaaaaattatgggccgacgcaccccttgtcaatattaacgactggattaatgattaatgatttatcaaagttttgcccagttatatgaccagctttttgatcctgaaatgtaccagaagtgggaaaagttcacaattaaaaaccttcctgctaatactaagagcattttagatttagctggcggtagtggacggttaggagtaatgctggctgctcgtggatttgatgtaacggttgctgacttttctgctgagatgctcagtattgccgatcaacatgccacggaagcaggagttagtatgaatctcttgcaagctgatatgcgggacctcagtgctttaccgcagtatgatgcgatcacttgttatgcggactctttttgttatttagacgatgcagcggccgtgcaaaagaccttcaatgaaattgctgatcatttgaaagataatggtgtctttttatttgatgtcatttctccttatcaaactgatgtcatttatccggggtatatgttcaactatgaggataaggatcatcagcgagcgttcatgtggcagtctttcaaagatgatgatgttgagcatggcgtaattcacgaattagcttttttcactcgagataatgatggacgttatgatcgtgttggagaaacccattatgaacgtgcttatgaattgcctttattaaagcagatgttatctcaagctggttttaattctgttgaagtgggatcaaatttttcgacttctatcaaagaagaaaaaccaacacgatggttctttaagtgtcataaataaggagagttcacatgaaagcagtagggatggttgttgaatataatccatttcacaatgggcatcgctaccaccttcagcaagcgaaaaaaatttccggggcagatgtaacggtagcggtaatgagtggtaattttacccagcgtggtgaaccgacaatcgttgataaatggtcgcgggctagggctgcagtgatgaatggcgtggaccttgtaattgaactaccggttttttatgctgtccaaccagcacaccggtttgccggaggagcgctgagtctcttaaatgctcttggcgttgactcgattgtctttgggagcgagcatccagaatgggattttgcccgtttggtgaaggctgaagaagcttttaaccaggaaagttttaataagtataatgcaacctatgccacccaatttaacgagcaattgaaggaacaaactggtgtcaccctgattgatcccaatgatattttagcttttgcttataccaaagctaaaatcaaccagggttatcattttgaattgctgcctatcaagcgacaagggagtaactatcacgaccagcaaatcaaaggaaagattgcgagtgcgagtgcaattcgtcaggcaatcaatgaaaagggcgattaccggcaagctgttccacaagtgatgggagatatattggcggcaataaagagtattccttcatggacagacctttatcctttattacgtaatcagcttattcaagcgcctgtttcaacccttcagtcaacttatctaatggcggaaggattagaatatcggatgaaggaagctgcccagcggagtcttgactttaattcgtttatgaaattcaccaagactaaacggtatacttatgcccacttattgcgagtttgtttatacactatcttgcagattacccaagaggaagtagctgagcatagtaaacatccttatcttcatgtcttggcctttaataagcaaggccgtgaataccttcatgaggtaaaaaaacagcttgatctaccgctgattacaaaagtcgaccaagaaatgcgggatcaattgcttaaccttgattaccgagcaggaaaactatatcagttatttacgccggctgaacaagatttaaagcacccgccgataattattaattaacgtctttgataaagtttggtaaaatattctaagtagatttggttccctaaaaggttgtcaaggaaaaaacattgacaacgtataaggggactagtataattgcacatgttgcattaggaggttagtacgttgaaatggtcgttagctgaattacatcgttaccaagatgaaccacttcatattcaaagtacttttgatctgaacgcatcattaacgaagctgtttccagatattattttagctgttcaaccagttaaagttgatggttacgttacttatgacgatggtgatgcaacgattagcgctcatgttacaacgacgttaaccgttccatctagtcgctcgttaacacccgttcaattaccgctcgattttacgttctcagagacgtatatcgatgatcgttcacactttgcccgctatgaggatgaagatgaggttgttttccttattaaaaagggtgattcaattgattttgatactgcattagcggaaaacatcgttgaacaggtaccgctacgggttctttctgccgaagaaaaatctggcaaaccaatgccaaatggaaaaggttggagtgttatctctgaagatgactacaaggcccagcagcagaaagatgacaaagttgatccacgtctcgctaagttgcaaaacctttttcctgatcaggataacaaaaaatagcggacggttaaaaaccatttgtggataattctaatttcttaggaggtgtcaaacatggctgttccagcacggaagacttcaaagactaagaagcgtatgcgtcggggtcacatcaagttaaatgtacctggccttaccccttgcccaaactgtggtgaacttcgcaagtcccacatggtatgcccaagttgtggttactacgacggcaagcaagttgttaacactaacaactaattaatataaaagctatcctttaggcgccggacctaggatagtttttttattttaaaattttctaagaatttacaagtgaaaaatgatataatctaattccttgataaatcgagatttttagtatagagaatactggggtttattaaaaaattgtgataaaattattgtgttttattaatacgtataacaagtaaaaaaagattattatagtaggtgagttattaatgagtcgaattttgattattgaggatgaggaaaatttagcaaattttgtagaacttgaattaaagcatgaaggttacgatacagatgttgaacttgatggtcgtgctggattagaagcagctttaaatcaagattttgatgtgattttgctagacttgatgctcccagagttaaatgggattgaagttgcacggcgggttcgtgaaataaaagatacaccaattattatcatgaccgctcgtgattctgttattgaccgtgtctctggtttagatcatggggcagatgattatattgttaagccatttgcgattgaagaactccttgcacgggtccgggcgttattgcggcgaatcagtattgaagatggtaataataaggaacatcaaacaacggtcaattacaaggatcttaccattgaaaaagagaaccgggttgttcgtcgcggcgatgaagtaattaaccttactaagcgggaatacgaattactgttgatcttaatggaaaatatcaatgttgttatgtcacgaaaagaccttttgagtaaggtatggggttatgattccaaggttgaaaccaatgttgttgatgtttatattcggtacttgcggaataagattgaccgtcctggtgaaaagagctacatccaaacggttcgtggtactggatatgtgattcgctcctaggaatgatcaattatgaagcaaaaagatgaaagacggtttgtttcactaaaaattaagtgggcagctggaacggcattagggtcattaatcatcttttgtatcgttgcgatggcattgtttagcgcgtttacgcaaaatttatttcatcaagaaagacaattattgaatcaagggatgactaatattagtacacaattaagtactgttgataagcccttaactaaaaagaatgttagtcaccttattgatccagacagaaaccggtcgaatattatttctggagaggaatataaacgaccggtaattaaagagttaagtgatggacacttggttattaatatttataatcctgatggaaagaatattttgagtactggtcgttatattaaaaagccgcagtttacgactaatcgcaatattcatattgctgctgggcctgatcatgatgtgttggtcgggcagatgccaatttatggtcagaataatcggcagttgattgggtacttacaagttgaaaataaccttgacgcttatatgcaaagttatcatcagttggcattagtatgtatcttggctctctgcctggttttgattgcgagtgggctattgggatactttctttccctctttctccttcgaccattggatggaattcatgacacagttaaggagattagtgcagatcctactaaagatgtccgggtaccgactaccaatcgtaacgatgaactagcagaattgataacaatgtttaatgaaatgcttgatcgaatgcagcggtatatcgaccagcagtcacaatttgtcagtgatgttagtcatgaactccgaacccctgttgcgattattcaaggacacttagagatgcttcagcgatggggcaaggatgatccaaaagtgctggatgactcaattaaggcaacattaattgaaacgcgccggatgaaaaacttggttcaagaaatgcttgatttgagccgagcagagcaagtagagattaattttcgcaaccagcatacgattgttaatgatgtggttcaccaggtctacaataactttaagatgctatatccagactttactttccgtttggacgacgatctgaaagaaccaatcatggttgatatttatcgcgatcatcttgaacaggtccttgtgattttatgtgacaatgctgtcaaatattccactgatgatcataaagagatccatattattctttcacggggaatgaatactgttgagattggtattcaagactttggtgaagggatctcaccggaaaatgtaaaacgggtctttgatcgcttctatcgagtagataaggctcgtagtcgtaagaaaggcggcaatggattaggtctttcaattgccaaacgactaattgaaggttaccatggttcgattaccctagaaagttcagtcggtgctggatcattgtttagaatcattttaccgattattgaagatccagagacaaaaaaataaatatttaagatgtgagaatagaagcaggatgagaaacttttgctcctatcctcacttttttattacaaaacatttttatttaattgttttctcaatggccgacaaaataagcgatgttttcaactaagggcggtataatgaaaacggatactaaaatatgaggatttttattgaggagttgaataggagtggctgcgaaagagcagaaaaaattaatcacaacgccaacattggtgttaatgattatttcgacaatatatgggtttggtaatgtttcaatagcctatgatcaaatggcatatgcggggatgttttggtacatccttgctggagtttgtttcttcttcccctgttgtttgatgatggctgaatatggttcggcatttaaggacgccaaagggggaatctattcctggttagctggttcgataggggaacagctggcctttatcggaacctttatttggttagcgagttgggttctgtggctagtatcaagtgcttctcgactttggataacattgtcggcactattatttggccatgatactacccaacaatggcatttttggatctttaattctaatcagttaattggtatcttggccattctttttgtcttacttgtaaccttactgagttcccagggaattaatgggattacgaaaatcagctcatttggtggagcgtttatgattggaatgaatgcaatttttattattgcaagtttagtagcgattattgctaacaagggggttactgcccagcctattcatggtattagcagttttattgagtcgcctaatcctgcttttaagacgccaattgcgattatttcattcgttgtttacgcaatctttgcatatggtggaatggaaaatctaggtggagttactgatagtatgaagaatccagcgaagacatttccaagaggcttagttattggttcgctcttaacgattggcagttatgtgctaatgattttaatgactggctttagtgttaattacaatcatgttattgcaaaatcaagcgttaacttaggtaatgttacttatgttgtctttaatcaattaggataccaactaggtgtgtcactagggttaagtcatgctactaatatttttcttggtgttctctttacgcgaatgattgcgttagctggcctgatggggatgttaggagcaatgttcctgttagtttactccccgattaagtcctttatcatgggagctaatcctgagttatggcctaaaaaaattgtgacattgaacaaacacgggatgccagcatatgcaatgtggattcaggcaatttttgtttcgtgtattattttcttagttgcatttggggttcagcagctgctagtttttaccaaatcttgacagatatggttaatgtttcaacctgtgccccgtatatcttccttgttggtgcattcccattctttcaaaagaaggatatcccacatgattttgtagtatttaagaatcatttttggacaaatgtattagttgtctttgttgagataattgtttgcctaggaatcatctttacatgcatccaaccaattattgagcatgattttcaaactgcattctggacggcatttggtccggtcttctttgggattgttgctttgattttctacaatcacgcatcaaagaagattacaaagtagataaaagaggaggctgggagaaaacttttgttttctctcagcctcaactacttttatgaataatagtaagataacgtggaactagcttcgcgtcgccacaaggctcgagtctaagtacgaacgataatcagcccgtgccgtgctaatcaccgttctatccttagcccaccgccttgtcgagaaggttattttccacttactctttattcaattttttaagtcgctggtaaatgataattccaccgatgcaagtaataacaaattcagtaaaaggaactgctgcccagaccccattaattccggcaacttttgccagaataaagattgcggggagaaggataatataaccacgaagaatcgataaagagaatgatgctcgcgctgatccaattgctgttaagaaaaggatgaacaatagatttaacgcgctgaagaatacacttgtaaagtaaatcgggaggccaacactagcataggcgaggagttgaccagaatgagaagtgttaaaaacttcaataattggatgcttaaaggtaattaggataataaagctgattgttgctagaaagagggtaatgataatcccattttttaatgtcatcgatacattcttgtatttgtatttaccaaattcccgactagcaagcggttgaacaccgagcgctactccattagcaattgctagcacaacgatggcaatgttggaaataacgccatatgcggcaacggcatagttattagctagttgcaataaaacatggttaaagaaatagatactaacaccagtacttaattcgtttaatgctgaagcaacccctaaacgtgctgagcgccaaatgtttcttaggtgagggacaacccagtgccattgtaattgtcgtccggcaaacttccgatgaaaacttaaaaccatcaagctaattgctggcgaaaataacactgccaatgctgctccttccaatttaagacccattccaaagataaagaaccagtcgatgagaataacagataatgtttcagttaaggtggcctccatggttaacgtgggattgccatcgttacgaatgaaattaatggcaatgtaattaaccatatagagaggtccgctccatgaaattattcgtaaataaatgattgccatctgacgagtggcatcatctgccccaaggaaattaactactggagttgcaaaaatgtttaataggattgctaggataagcccaaaagtaaaagcaaaaatcatcagttgactaaataatgattttattctctcaggatgcataactttatttaacgaaaagattgtggcgccaccgactcccagcaatagcccggttccattaaaaacgttgaacagggggagcaccaggttaagcgtagttaagcctaaagccccggccgcgattgaaataaaaagggtgtcaataataacatacattgacatcccgagggtggcgacaacattacgaataacataatgccgtacttctttggtaattgacattggtgaatccatattaaaacctccacaaaacttgctcccatcctcccagttggacgcctgtttgagaagcataacttaatttgttgcagaacccggcgattctactttccttatttcatttattgatattttagcaaatattctcattgcttatattataattccattacaatggtcaatttcatgttgaacaatctcagcagcaaaatctgtaagttctaatgtttgcgtttgccagctctgattgcgaaatttaacggtaatttgcttataccgtttagtaggacgcgttccgcttaatgaaaggcatccttctgcagtttgataagggtgacttttagcgacaatttgcggattgaacattacgacattaaagggcccgattcgcgcaataattgcattcttatttacaccaatcatattggcagccattccaacacattcagcttggtgagcattaagcgtatcgctaagatcggttgcaaggggcaaatcagctttagtagttagggttgcttttttagcaagtaattgttggtctttaataattggtttaatcatgtgtcttcctccgaaaaaataaagctgagaaaaaacttttgctttctcccagcttcttaataattattttttatgatgttgctgtttgccagcattacgttgacgattacggtttgcttgatcgcttggcttggcatcgcctttacgtaattggtcaattgcatcagtcggtttagttgaagaactaggggtgttaattactggtgcttctggcattttaattggattcttcttgctctcttcctcaatttggcgacgaatccgcggacggtaagcattgaccatcaaggtttgtaagatggcaaataatccaccaatgaagaagtaaagacctaatccggcagaagaagtgatagaaatgaagaaggtcatgaaaggactcatccaaatagcagccttcatttgcttcttctgggcttcaggaacactgacaagcccaagataactctgagcagcataggcaataaaagataagaccgctaagataatacttggcttaccaagtggaatcccaaagaaagttgcatggtaaaggtctggagaataacggatagcagcatataaggcggcaaaaattggcagctgaattaacaatgggagacagccgattccgccagttaagctaatgttgttatcccggtacagagccatcatttgttgactaacggcagcctgttcttcaggagtcttggctgctttttgcttttctgttagttctttaatcaatggttgaaccttggacatcttttcttgcataatggttgattttttcatttgtgagaacatcaccggtaaaagaattgttcgcacaactaccacaatgacaataattgcccaaccgtagttattgcccatgtggctggctaaccattccatcaagtgctgcattggtttagccatatagtcatagacaaacccgtatggtcgaccgctcttagtagtccgtacacatccgctaagaagcagcaggagggtaaagagccccccagcgatcgttattcgttttcgtttcatattaatgaatcaaactcccttatttctttgtatattaattacgttaatagtacgtattttactctattcaggaattgaattctaccgctaatcgcgaactaatgcgtgatttgaaatgaatgatggtagttttgcaggcttccttcgatgattttaaccttagtaattcgagcataaggagtggggccagctttaattttagagattaattgtttaacaatctcaatgggaccctgcaattcgcaataaacgctcccatcatgcttattcataacgatcccttctatttctgcttgttgtgccaactgatagacgctccagcggaatccaactccttgaacgcgtccagtaatggtaagatgataattaaccataattaaagctcctcgtattctataaataaatctttacggattttgctacattacatcttgtcttctggtcaccgcatgataacctctaattatcattggctttggtcaactggtataggttaatacctcctgtagtttgaactacttattaagtctgccgcccaggcaatcaactaattttcgaactcacatgctgtatcgattagagaatcgactaattcagagtaggattaggtgcagctttgattctctaaccaatgaacactgatacttgcgaggatgtctttagtgattgtaattaggggctatcatgcagtgatcagattaagaccagtaaattttaatgaaaggaggccattccaatgaaactatttgtcggtattgacgttagctcaaaagatcttgtaacctcgatgatttccgaaggaaaccacgaagttgttttccaaggtaacttcgttaatgatttgaaaggcgcaaccgaattaaaaaatgtaattatcaacacggcgaattcaaatcatttagaccaaattattatcggaatggaagctacttccatttatagttttcacccagcgatgttctttcaagaagattcagacttgaaaaagctgaatactcagtctgttgtcatcgatcctaagaaaactaaacgctatcatgatgttttcgctgaagacaaaaacgatcagatcgatgctttttacatcgccgattatttacgtgttggtcactactcagttggatttgtccgtcaggacaattacattgctcttcaacgcttaacacgttcacgttatgaactggttcaaagtctagttcgtgctaagcaacactttattgagaacttatactataagctcaatgaactagtgatttctgatgagctaaacacttcagtcttcggttcgacgatgatgagtcttttgactgaagatatgactaccgatgacctgctcaatatttctctttccgacttaactgcgtatttaactgaacatggacgaggtcgcttcgcgaaccctgaagccctagctaaaacaattcagaaggctgttctctcttcttatcgtttagataaagttgtcgctaattcagtggatacggtcttgtctgtttatgccgaagagattaaagcctttcaaaaaatgattaaggatctcgacaaggcaattgagaagattgttaaagtaattgatgaagaacaaattctccgctcaattcccggcatcggaccggtatacgcagctagaatcctagctgagattggtcaaatcgaacgatttgacaatgaagctaagttagctagatatgctgggctttcctgaaaagaaaagcagtcgggaaattacgctagcgataatacaccacttaagagaactggtaatgcttatctcagatactacttggttgaagctgccaaccgagttaggatccaagatccagttttcggtgaatattaccaacgaaaatataaagaagtgaaacgtactccatccaaacgagctctcgttcttaccgcacgtaaattagtcagggtgattttcttcctactcaaaaatcaccaaatctatcaagaaaagaggtaattggtatagaaagataaaatgattctcgacgcttaagttttaaaacaccttggtatcaaggcttatttaagtgcgcccaaaatctggtcaagacaagctagtcagtgataattacatcctgacttattaccacatgacttaatgaaaacttattattagttaataacaattgtacaacaggaacatggtataatttaattaacaagaaggagcatgcaaaatatatggaacaattaacatcaattcataatcagcacgttaaagattggaagaagctgcaaaccaaaaaagcacggcgtcagactggtacttacctgttagacggctggcacttagttcaagaggcatccaaagctggaatcgagctcttagaagtaatcggaacagctgaacaattagctgcccatccagagcttgaaggaatggctaatgcaacctatgaagttactgaagagatcatgaagcatattacagatacggtaacgcctcaagggattgccgcggttgttgctttaccagattctcatcatttaccagcagggccattgcatggggcatggcttttcctcgaccgggttcaagatccaggaaacgtggggacaatggtgcggacagcagatgccgctgggtttactggagtagtagttggacaacgctcagcagacttatttggtcccaaagttgttcgttcaatgcaaggaagtcaatttcaccttcaaatgtttgagggtgacttaagaaagtggattgatgattttaaatcaatcaatgctccggtgtatggaacgcaactgaatccccaagccaaaaacttccggactgttgatcctggtgatacttttgccttaattatgggcaatgaagggcaggggatgagcgacgatcttctttcacaaacaactgataatctctatattccaatgcgtggtgaagccgaatcgcttaacgtcgctatctctgcaggaattttaatgtttcagcttaatcaaaatctagattaaattaatttattttctcgttaaaatcgtgtatgataattgcaataatatagaaaaggggtattacatgaaatcaaaaaatgaatggcgcaccgataaagagtatgtttcaatcgttgccgatcttttagcccagccagctgtccaaaagctagcgaactatactcagcatcatcactctacccgcctgcaacattctattgcggtttcgtatgatagctacaaaattgctaaaaaatgcatcttgattatcgcagtactgcgcgggcaggtctcttgcatgatctcttttattatgattggcggacgactaagtttaatttaggaacccatgcatttattcatccccgagttgcattacgcaatgctgaaaagctaaccccgttaaataaaaaagaaaaggatattatccttaagcatatgtttggcgcaacgttggcagtgccacgctatccggagagtttaattgtatcgctagttgatgatttcgaagcagagcatgaattctttggcccgctacgtgcaaagatgcgtcgaaagattaagaaacgtcgaatgcaaacaacttggtagaggagaaggagagttaaattatggaacaattagtagcagaaaaggcacttgatgaagactgtaaactttgtccaaaatttacacgtacgtttatgatcttgggaaagaaatggaacggattaatcattgaagtactacttaaaaatggcaacatgcgatttaaggatattgccagtagcattgcaaagtgcagcgatcgagttttatgtgaacgattaaaagaactcgaagacgaacaaattgttattcgtaacacttacgaaggttctagtcgggtagattattctttgactgaacgtggtcaagaattgcgcccagtcatggaagctgttcatgcatggagtgacaagtggatttaaaataacgcttgacgccttacagatgattgtctagaatatgtaattgaattaaaagcgatgatgagagctagtagctagacgatcctgttagagagttgcaaccatgagctgagaattgcaatcagcgatctaaggcgaatttcactttcggagctgatacgtaatggtattccggccaatcaccgttattgattatttgagtgtgtaggatttgttcctacaaactagggtggtaccgcgaagcctcgtccctatattgggatgaggcttttttgaattaaggagtgaaaatatgggactaagagagaaattagccgaacttcgtgaagaaggattgcaagatattaaacaatcagaggatttaaagcgaattaatgaaatccgcgtcaagatgctgggaaagaagggaccgattacttcagttcttcggggcatgcgtgatcttagtgctgaagaacgtcctaaagtagggcaatttgctaacaaggtgcgggatgaattatcagctgcgattgaagaaaagcgtgctgagctagaacaggccgccatgaatgctaagttagcagcccaaacaattgatgttactcttcctggaacaccagtagcacaagggcaaccccatgttattcaacaaatcattgaccaagttgtggacttgtttgtatcaatggggtatgaagtagcagttggggatgaagttgaacaagaagtttataactttgaaaagttaaacttgccaaaggatcacccagctcgtgatatgcaagatacattttatgttacgccatctgttttgatgcggacccaaacgtcaccaatgcaagcacggatgctcgaaaaacatgattttagtcaaggcccactaaagatgatttcaccaggtaaggtttaccggcgtgatactgatgatgcaacccacagtcaccaattccaccaaattgaagggatggttgttggtaaaaatattaccatggctgatttgaagggaactcttgaggccgttgctcaaaaccttttcggtgacaagttaaaggttcgcttgcgaccaagttacttcccatttactgaaccatcagttgaggcagatattacttgtttcaactgccttggcaagggttgtgcaatttgtaaacaaactggttggattgaagttcttggtgccggaatggttcatccaaatgtgcttaagatgtcaggcgttgatccagaagaatacggcggttttgcctttggacttggaccagatcgttttgccatgctgaagtacggtgttgatgatatccgtaacttctaccaaaatgatgtccgcttccttaaccaatttgaccagaaaggataatgtgaaatgaaagtatcatatcaatggcttcaagaataccttgatttagatgttgcccctcaagatttagctgaaaagattgctcgtacctctgtggacattaatgacgtttactcactgagcgacggattaaaaaagattgttgttggggaagtagtaaaatgtgaaaatcaccctgactcagaccatctccatgtttgtcaagttgatgttggcgaagaagaaccgattcaaattgtttgtggtgccccgaacgtccaagaaggtaaaaaggtaatcgttgcccttcacggtgcgcgaattgctgataaccaaaagattaagcgtggcaagatccgcggtgttgagtcaaatggaatgctttgtgctcttcaagaaattggctttagcgacaagattgcgcctaaagattacgaagatggtatctacttcttaccagatgatgctaaaaatggtgatcctgtatttaagtacttaggaatggacgatacgatcatcgatacagacgtaactcctaaccgtggagatatgcttagtatttatggaaatgttaatgatatcgctgccttttatggattaaagccacattttaaagaaattacgattaaagaagaaggcactgaaaagacagcggaccttctccaagcagaaattaatgatactaagattgcaccaacttataaattacgggtaattaaaggtgttaaaattgccgaaagtccactatggcttcaaattcgcctctggaacagtggtattcgtcctgtaaataatgtcgtggatgtgactaactatatccttcttaaatatggtcagccactccacagttatgattatgatcaattatctggtaacaactttggggttcgtcatgctaatgaaggtgaaaagtttgttacattagatggggatgaacaaaccttaaaagcaaatgatattgttgtaactgtcgatgaccaaccagttgctcttgcgggaacaatgggtggagaaggaactgcagtaagtgatgatacgacaactgttgcccttgaagcagccatttttgatccagtaatggtccggaagcaagcacggcgcttagatcttcatagtgaatcttcaatgcggtttgaacgtggaatcaatccagcaacagttgaaacggcattgaatgaagcagctgaaatgattaaggaacttgctgggggaacgattactgctggaattgttactggtagtgaagcgccagcagttgatacgccaatcaaactatcccttgcgaagattaatcatgtcctgggcacttcattaaccatggaacaagttactgatatttttgatcgcttggcatttgcttacactgttgatgatgacgatcaattaacagtgattgctccagcacggcggtgggatattagcctggcagctgatctttatgaagaaattgcacggatttatggttatgataacttaccgtctactttaccaacgatgacgcgtaaccggggaggacttacgccacgtcaacggtttattcgggcaagtcgtcatgatctcgaaggaatgggcttaactcaagcaattagttattccttaacaactgttgagaaggctaagcagttccaaattaagccacttgctgaaccgatgaaactcgacttcccaatgagttctgaccatgtagctacccggatgaatattgttagtggcttgcttaatgatattgcttataacgtggcgcgaaatgttgataacgtagcattatatgaagaaggccgaatattcctgccaatgggggatgaacgtccagtagaacaagaacaccttgcagctgcggttactggccaaatggtagctaatagttggaataagaaggatcaaccggttgatttcttccaattaaaggggatcgttgaacgttaccttaagaatatggggattgctgggaagattacttatgttccaactagtgatcgtccagaaatgcacccaggacgaacagctgatattatggttgatgaccaattagtcggcttcatcggtcaagttcatccacaaactgctaaggaatataagattccagaaacatatgtatttgaattaaatctagaattattactggctgcaccaaagattgaaaatgaatatacacctattagtaagtatccttcaatcactcgcgatattgctctcttggttgatgatgatgttgaaaatgcaacaattgtagaggcaattaagcaaaagggtggtgcttaccttaaggacattcacctatttgatgtttatgctggttctcaccttcctgctggcaagaagtcattagcttacaccttaacttatcaagatgataaaggaacgttaactgaagaccaagtaaacacggcctttgataaggttactgcttacttgcaagataaggttgatgcagaaattcgttaaaaattaaaaggctggattttttcggcctttttttagtgcaaataattattttttacgtatttatattatagggctaatcactaaactaataattagtggttgaagcgctgaaaattttctgctattttattaatagtttgataataaaataatgatatttaatataaagagggataaacgaaataatgaaatcaacaacaaagaaaattcttgcatcgtcgttaggggtagctggcgcaatggcaatgggcacggtaactgcaaaggctgatacgaccgttacggtcaatgctggcgatagtttgaatgggattgctcaaaagtataatgttagtgcggatgatattgcaaccgctaatcacttgcaaaataaagagttgatttttgtgggacaaaagttgacaattccaaccaaagataaaaatgaaacacctgctaataatgctgagaaaaaggatcaagccagcaagaacagtcaaagtctacaagattctgttaacaaggcaatgtcttatttaggaaccccttatgtatggggtggtaataaaccaggtggatttgattgttctgggttggtccaatattgttacggtattccacaacggacgacgtatgaacaacaagctttaggaccacatattcacgataatgttttaaacgcgccatatggggcccttgttttctacggttctgatgatgcgccatatcacgttgccatttcacttggagatggtcggattattcaagcaccaaatgaaaatgaaacagttaaaattactgaccaacaatacttccctggaaattactatgttgtgatgcattaatattccctttcacctcacctttaataatttaaattagtaattatcttgcgcatcacaaaagagtgctatatactatttcagattagaaagttttatgagggagacaaattgatgagtattcaacagaataagcgtccagtagttattggtgttacaggtggttccggtagtggaaagacaacggtaagtaataaaatctatgaccaattgcatgggcaagcgatccagattattaaccaagatacttactataatgatcagtcagatatgacaatggatgaacgtaaagcagtaaattatgatcatccacttgcatttgataccgattttttaattaagcaactaacggatttgcgaagtaataaggctattgagatgccggtatatgactatgcacaatatacacgttcagccaaaaccgttcatgtagaaccaaccgatgttattattttggaaggaatcttaattcttgatgatgagcgtttacgtgatttaatggatattaaggtttacgttgatacagatgatgacattcggattattcgccggattcaacgtgatatggtagagcgtggacggtctcttaattcaattattacgcaatatttagctacggttaagccaatgtaccatcaatttgttgaaccaactaaacgctacgctgacattattgtgccagaaggtggcgaaaatcaagttgcaattgacctattgtcgacaaagatccgtgatattttggtaaaacgtggacatacggaattacaataggtgtttacaagctgaagtagaaatggtaatgttgcactggataaattatgaggagtgtttataatggctgaagaaaaaacttttccaatgacccttgaagggaagaaaaagcttgaagatgaacttgaagaatatcgcttgaagcgtcgaccagaagttattaagcggataaagattgctcgtagttatggtgatttatctgaaaactcagaatatgaatcagcaaaagacgaacaagcaatggttgaaagccgaattgctcaaattgaaaacatgcttcaatatgctgaaattatcgataatgaagatgtcgataaggatgaagtatctatgggtcggacaattactattcaagaattgccagatgaagaaccagaagaataccaaattgtcggtgaatcagaatctgatccatttaacggtaagatttctaatgaatctccaatggcaaaaggattacttggtcacaaagttggcgaagtagttgaagttgaagttcctaatgggacaatcaagctaaagattgtcaaggttgattaattaaaataagaaaagcgaggtcgaggaatgtggtgaattcctcaatctcgcttttcttattggtattatttttctactatgctatagtaagatgtatgaaagcgatatcactgaacgttggagggaagaaaaatgaaattgattattactgatgctgcaagtcaatggtttcgtgacgaaatgggattagaatcaggaaatggaataaagttttacggtaaaacctatggtcaaaccgaagtccatcatggtttttcacaaggattcactcgtgaagatacaccagttgatccaattttagaggttaaaaaggatggtattaactatcacattgattcgctagatgagtggttctttaaggatcttataactactgttgactatgatccgcaagccgacggaccggtttttcattttcaacatgaagatggtgatacacctgacgtagctggatttgttaatgacgctgatgaccattccgataataaggctgacgcctctactggagcatctcagcattaattttttatatagtgaaaaagctctttagcataaactattctaatgatagtatgctaaagagctttattgttaatcaaacattgtccttatttgatgttctttcttaacccaccaaccagttaaaccgagacttataactgtaattataagcccgagaatgagaaacggtggccgataataaaattcaacccgatgctttccgggactcattggaatagccataaacgtattaagcacggtttgtggagtagtagacttaccatctactttaacgtgccaacccttggcagcagggatagtagtcattaatactcgctgatttcgctggagattgactgtaccaacgatccgattactacggtatgaactaatctttaagggagattcttggagagtctttaagcttgccataaatggccgttgctttagttgatagatactaacgttttgcatccaaagtgtagctttctttagttgcaaattgacaaggactttttgccccttttgatcatgagcaacgttgattactaccgtattacgaaaggtgtcatattgggtgaattttttgttattcatcgtaattgtggcattatcctcaacgtttggtccgagcgttaagtagtaagaatcgttggttggcggaataaattctagctgaactgatgctggtttaagcaggttttgctttctaaagatcgtgccagtaatttgcttagcactttgaacattattgaatttgacggaattaaagttttgaacggcaaataatgaatgaagtgttggacgaccggcaagcgtttggaaaatctgtgactgatagtttaacggatccattgttgtccgttgaaggtgaaggatggcggtattagctccaaatgcgatcggaagagcatgtggattctcacggagattgactgccgaagttgatcctactaatgggtaactgtaccaatcaggacggaaacctgataggggtaatgcctgtccggctgacgtgttccgagcattcatagtgtatttgtaaccaagaagcgcatcactcacttgagttccattagtatacgtaacaaaaccatccccatctggctgcccaattgcacccatgaaggctggaattggcggctctaaggtcgaaccaaaatggtcaccagaattaaagtctgcttggaagggatcatcctttgttcgcataaaagttttggcaacgcggtagaaactcggatcatgcttctttagtttttttacacttttatcaagagcaatagtgtagttgccaaattcaggctgtgaaacgtaagagatcttattaagcgccgtgtacccactcatagaaatatcacagacagcaaggagaacaagaagcgcgtcgtataagcgcggtgaatttgttcggggaatacaaaggcaactaacagcgatcagcgaaaagcataagccgatattccgttgattgctattaatatacgataagttaagcgtaccaacataccagtaaattgcgataataagcaacgtcaggataagtgcactgcgcttttttattttgaaatcaggttgaagcactttagctgcaagatagatgcaccagaaagagaaaaggtaggaaaaacgataagggtaccaaactggaaactggccggcatgccataaaagatctaatggttcgtaacagaatgagaaaataaagaaaatagaaatggctgccccaatcaaacgacgacgaaggtcaaagtgattattgaagaagtagagacaagcaccgagcattaatagcattccgatataaatgttaggctgaccacttggcatttgattaaaattaaatgatccggggacaagtttcccaagcattttaggagcaaagtactcaaaacggctgtgaatcttggtttcagtgtagatccctttactttgcattaaggcatagaaagttggcaataaaatgactgctgaaatacccaccgcaagcagcgaactgccgagatagcggagaaaaattactccccgttgtcgccatgaggctaacgctggtgtttgccagaggaaaaatagaaaagtaaagatggcaatcatccagcccatataataattatcaatcagcattacggctagccaagcgatataagttccaacacggttttgataaataagtttgaggagtccccaaataattaacggcaaaagtattaaagcatcttgccaaatcatatttaattggttggcaatcatccagccattcattgagtagactgtactgaatgctaaaattcgccacccctgttgtagatccgttttttgcattagccaagcaaaactcaatcccgctagaccgtatcgaacgagtgtaacgatggttatcccagttgcaaggtgttgagcagggaagaataacaaaattaagtttaatggacttagcaagtaatacgcattagttccaaacatttcgccaccaagtcctttgctaaacgaataaaagaaactgctgggatggtggagaatagtatttcgaaggtaactgaaaaaatcgacatattgttgaccgagatcaacggttaataagctgcttttgccaaagggagtcatttgacggtatgcaaaatagcaagccatcaaaataactggtaataggaaacttgcaatcaaaattttgcgtcgatataaacgatgatgttgatataaaaacacagcaaaattctccttctctcaattaaatagacacatccacattatcatatccttttttaaaatgatattcattactattgttcattaaatttcattaaatcattggaataaattcttcatttcttataaataaagagtattattttcacgttagtagtggtaactatctgttaaagcaggtaattttgttaaaatagattcactacgatgaaggagaattataaaactgtgaaattctttgatcgaataatgaacttgtttggttcacgtgccaaaaagcgtcaaaatgcgcagtcaattattccattccggctgaacatgctattatggattgttggtatcttgttattagcgttaactattcgactgttttatcttcaagttctgcaaggaacatcatttaaagcggaagtaaagcgatcagatacaacaacgcagacgaataatgtacaacgggggatggtttatgattcacaagggaatgttcttgttggtaatcaaactcatcaagccattacctatactaaaggggctaatgtaactactgatcagctctatcagattgctaatcgtttaggaaaatatgtgtctgtttctaataaaaattcgcgcttaactgatcgaaatgaagaggattattaccttgctgataaagagcggcttaagagtgttttgaaacatgtcaagacttcagatgccgattctgaagatactaaatataataaagctctcgaatatttgagcaagcatcctgattcatgggaacttacagatcagcaaaagaataatgcccgaatttatgcggcaatgagtggagcatattccctttcgacaacttatattaaagaaacgggtgttagtgctaaagagcttgcagcagttggagaacacttgaatgaaatgccaggggtaaagattggaacgtcttggactcgtaattacccccaaggtacagatattcaatcgttaacaggaactgtctcaactactggtttaccaagtgatgaagttaactcattgcttgctcaaggatattctcgaaatgatagcgttggacaaagttatctggaaaaacagttccaatcaactttagctggttcgaagtcacaaactgaagttactactaacggaaatgatgtaactaaagaaaagactaagtaccctggtaagaagggtgataaccttgtattaacgattaattcaaaattccaaaagcaagttcaatcgattttgaaaaacaattactcagctgccggaaaccagtattctactggggtatatgcagtagtaatgaatccaaataccggtgcaatttatgcgatggcaggaattgaccgtgacccagcaacaggtaaagaaacccctgatgaaattggtgctatcaaccacccaattacgatgggttcagttgtaaagccggcgatggtcatgggggcattaatggatggtgtaattacgccaacaaataataccttaaccgatatgccaattaagcttgccggaacttcatctaagggatcatggtttaaccatggtggatcagcaaatatggcaattaatgcagcaacggcgctcgaagtttcttccaactcttatatgatgcaactactcatgaaagaagcaggaatgaaatatacaccaaatgcgcaaattacgatgaagccaagtatttttgctaaagcgcgggttacttcaacatgtttggactaggggttaaaactggaatcgacttgcctggtgaaacaagcggttatacaggacctgctgaccaaaagcatatcggttcagcacttgacttgtcatatggtaactatgatggttatactttgattcaacttgcccaatatatgtctactattgctaacggtggtaaccggatgcgcccatacattgttaaagaaatccgtggtacgaaagccaatggtcaacttggtgccgttgaatatacaacaaagccccaagttcaattaaccattcctgcttctaaagctgactttgatgtcgttaaacaagggctttatcaagtggttcatggttctaaccgttatgttactggtaaagcgttggcatctgttaaaccatcagtatctggtaagacagggactgccgaaacctactacaagtcgcactcaacaactacgctaagttttgctggatttgcgccatctgataatccacaagttgtagttgctttggctattccaggagcttcaaattccgatggtggtgccaacctgacaatggcaaaacaaatttttgaagcctactggaagactgttcagagtcccaagggtttcggtgactaattaaactgtcaaggaaatttccttaacaaactttgataaattactagccaaatagaagaataaatgatatagttgtacgagttagggttacgataaataaccacgttaaataaaagaaatagtttggaggtcaaaataatgcgtgtcaacattacacttgaatgtacttcatgccacgaacggacttacttaactagcaagaaccgtcgtcacaacccagatcgtcttgaattaaacaagtactgtccacgggaacaaaaggttacattacatcgggaaactaagtaatgaccatataaaggagctgggagaccggctctttttatttatttttataaaaaaacgcttgcataaattcactcaagcggtgataataaaatctgataccgtttgttacttcactataaaggagcggtcataacataatggcttattcaaagaaagagttacgacaagcatatattgcgcgccttcaacaattagatttaaacacccgtctttacgaagagcgaaagttagcatctttgctatatgatcaacctgaatggacaggggctaaaacaattgctgttactttaagtcaatcttttgaaattgatactgaacctattatccttcatgcgcgtcataagggccaacagattgttgttccacggacgttgccccatcgtcaaatggaatttgttgaattaaatgaggataccgatttcgacgagacgtcttttggtattttagagccacatgatggcaaagtttattctccagatgagattgatttgatggttgttcctggagtagcctttaccgcatctggtaacaggttgggctttggcggcggttattatgatcgttacctaaaaaactataagggccctaaagtttcaatggcattgacaacgcaactggctgaagaaaacgaatgggaaccagaagaattcgatcagcgaatagataaagtgttgtatttaccggggatatagaagatgcggacacagggactaagattggcgcccgtgacgcttaccttaataatttttcaggtattagtttattgctggttagtttatgcaggtggctcaactaatacagtaaccttcctgaatatgggtgctcgtagtacgcccttaatcagggaaggtgaatggtggcgtttagtatcacctgtgttccttcatgttggtttatcacacttagtagtcaatagcgttacgcttttatatattggccgttacattgaagagttttttggtcattggcgaatggtaattatatactttgtcagcgcgttttttggtaatcttaccagcgcggtcttcatgccatcgacagtttcagctggtgctagtactgctatttttggattatttggcgcatttttaatgttgggtgtttgctttcaccataatgttattgttcgcgtcttaagtcgtacttttttgtgttatttattattattaatattgtgatggattttttcctgtcaggagttgacttggtaggacacattggcggcctatttggtggctttttcattgtatttattgttggtgctcccatgttaggaactgttgattacctgaaacggttgttaagtggagctgtattaacggtaagtttggtaattttgactctagaattgaagtgataatttatggcaatcgcctcaagaaactaccgcacactatacgatgttcagcaactattaaaagaattcaacgtgtttgtatatgtgggtaaacgactgtatgatattgagttaatggctattgagctcgataacctctatcaatcaggagttgtagataactcaacttatacaaaagcaaagattgtcttgcgtaaagaacatcgtgaagaacaaacgagaattaaaaggggtaaattgtattaaaccttacccaggaaaggaatcattatggctaagaaattaattggtgttgaccttggtggtactactatcaagtttgcaattttaacggagaacggtgagattcaacaaaagtggtctttgcggactaacattttagatgatggttcacacattgtgccagacatcattaactcaattaatcaccaccttgatttatataaaatgtctcgagaccaatttattggaatcggaatgggaactcccggaacaattgaccgtgaaaagggaaccgttattggtgcctacaacttaaactggaagacaactcaaaatgttaaagaagagattgaacaaggcactgggatgcaatttgctcttgataacgatgctaacgttgctgcacttggtgaacgttggaagggcgctggtaatgaaggtgacgatgttgcatttattactttaggtaccggtgttggtggtggacttatctccaatggtaagcttatccacggtgtcgttggtgctggtggtgaagttggtcacatgattgttaagccagatggatacctttgtacttgtggaaaccatggatgtcttgaacaatacgcatccgctactggaattgttcatatcgctcaagataaggcggaagaatatgaaggtaacagtcgtttgaaggcaatgattgataacggtgacgaaattacagccaagattgtttttgaccttgctaaggaaaatgattatcttgctaatactgttgttgatgaagtttgcttctacctcggtttagcaactgccaacttaagtaacgcattgaaccctgaataccttgttatcggtggtggagtttccgcagctggtgaattccttttgaagcgggtaaagcaaaactttgaaaaatttgccttcccaacagttcggacttcaactcaattgaagttggctgaattaggtaatgatgctggtgttatcggtgctgcttcattagctcgtcagtttgtaaacgcagattaatttgtaaggggaaatgatcgtggtacttggagttagctctggcttgatgattcttaatgcagtcattataatcatcttgttagtatggatttttagctgggcatttcagacttaccgtcgaaagagatatgcaactgtccttagtcaagatgactttaagcaaggaatgcgaaaagcacaggttattgacttgcgacaagaaaatgactttaaacaaggtcacattcttggtgcacgtaacttgccttatccatatcttcgtcaacaatatggcgaattgcggaaggacttgccggtttacttatatgatgaaggaatgacattaagtacccaggccgctgcatttttaggtaagcatgagtataaccacctttatatcttaaaagatggttatcgtgcgtgggacggtaaaactaagaagtccaagtattaaaaaagtatcttgtatgctttttatcaggatggttgaggattctaaacaatcatttgctaacgtttggaatttagcctcttgtaaaatttaaccaataaaagaggctggaagaaaacaaagttttcttccagcctcaactgctttcacgaacaatagcaagataatatgaaactagcttcgcgtcgctacatggcttcttgttttgaatcttaaataaaattaaagttggtgtgctgagcggcccttacggatagcagctcgacggttttgatcaaacttttcttcttcttcttccgctggtttaatgacagttttatggaaagtaagaaccccgctagcaatggcagcaactgttgctaaactaccaactaaaataccttttgctaattgtttcataacataaaacctcctcgaatttataggttacctccattatgcaagaattaatggcgttttaccagtgagaaggacaggttttagcataaaatttataaaaattggagagttaagatgaataaagtaatcgcaattgtcggtccaaccgctgtaggaaaaactgcactatcaataaaactggcacatgaatttgatggggaagtaatttctggtgattcgatgcaagtttatcgccgccttgatattggaacggcaaaagttactcccgaagaaatgggggatgtgccgcaccacctcattgatatctgcaatattgaagagcgtttttctgcagcccgttttaagaaacttgctgaccaaaaaatagacgaaatagctcaacgtaatcatttaccgattattgcaggcggaactggattttatcttcaaaccttaacagataatctagcattgggaagtgaccagtttgatcaacaaacgctcgacattcgtaaccattggaaagaggttgctgaagaaaagggagccgagtacgtttgggagcaattaaacgacttggatccagtagctagtactcggatccccaagtctaatactcgccgggttatccgggctttagaggtaattaagaaaacgggtcaattattttccaaccaaccccagttcaaagcaacaaatgattttctcttaattggcctgactactgaacgccctgttttatatgaccggatcaataagcgagttgatttgatgattcaaaacggcttgttagaagaagcaaaatggttatttgatcaaggaggggaagatctgccggcaggtaaggggattgggtaccatgaattatttccttattttcatggcgagattagtcttgacgaagcgattgaaaaaattaagcaggattctcgccattatgccaaacgacagttaacgtggtttagaaataaggctgatactcactggtttgatattttgcgtcatcccgatgatattaatcaaattaagcagtttataaatgattggttaaaaaaataaagtacggaaggaaagatttttttattaaaataaagctcttaaatagaattgacttatgccctgtctattgttattctaagtcacagtgttaaggagagaagcagatgttagatagattggtatggtcatctattatttctgtggagattgtatgaaagggaatgaaattttatgggtaaacacgtatttacaaaagatgaagttcgccaaatggtaaaggatgaagatattcatttcttacgagttatgtttactgacttattaggaacgattaagagcgttgacttaccagttagtcagttagataaattgatggataacaaaattatgtttgatggttcttcaattgatggatttgttcggattgaagaaagtgacatgtatctttacccagatatgtccacttggcttgcattcccttggggtgctgaacacgggaaggttgcgcgggtaatctgcagtgtttacaagactgatggtactccatttgaaggtgacccccgtaacaatttaaagcgggttcttgaagatatgcggaagatgggcttcaaagactttaacattggacctgagccagagttcttcctcttcaagactgatgaaaagggtaacccaactaccaatcttaacgataaggaaaattactttgacatggaaccagcagatcctggtgaagattgccgtcgtgacatcgtcttagctcttgaaaagatgggctttgatgttgaagctgctcaccatgaagttgctcctggtcagcatgaagttgacttcaagtactcagatgctttagaagccgctgataacatccaaacatttaagttcgttgttaaaacaattgctaagaagtatggtttccatgccacctttatgcctaagccgctttctggtattaatggttcaggaatgcacctcaacatgtcattgtttagtcaagatggcactaacgccttctttgatgaaaatgataaagataagctttccgcaactgcttaccatttcttgggcggtttgatgaagcatgcacgaagctacactgcaatttgcaacccaatcgtcaactcttataagcgattggttccaggttatgaagcaccggtttatgttgcttggtcaacttctaatcggtcaccacttgtgcgaattccgagtgatcgtggaatgggaacacgacttgagttacggtcagcagatccatcagctaacccatatcttgcaatcgctgctgttcttgaagctggtttagatggtttacgcaacaacttaccaccaattcataacgttgatgaaaacatctatacgatgacgaaagcagaacgagctgaaaaagatattcatgatttaccagatactttacacaacgcattaaagtctttggctaacgatgaggttatcaagagttcaatgggtgaacacctctataacagctttatggaagccaagactcgtgaatatgcttcatatcgtcaacacgtttctgactgggaacggcaacactatatggaacaatactaattaatgacaataagttaataagcaatgaaaaaacacttatgcaggattacttgctaagtgtttttcatgcgaaatcaactagttaattgacaaatatgttgtttcatatacaattatatttgttgcaataaaagcgtgttattataatgtggatagtacgtttttaaggactgctagttaaactagcaaccaattttaaatcggaattatatttcgattagttactaaaggagagtcttagataatggatcaaaaggtcagagttcgatatgcacctagcccaacaggtttcttacatatcggaaatgctcaatcagcattatttaattatttatttgcacgtcacttcgatggaacgatggtattacggattgaagataccgataccaagcggaacgttgaagatggtgaagctagccaacgtgaaaatcttcactggttaggaattgactgggatgaaggtccaaataagccaaatccaaagtatgccccttaccgtcaaagtgaacggaataaagaaggtatttaccacaaatacattcaagaattattagacaagggcattgcatacaaggattactcaacagaggaagaattagctgaaatgcgtgaacggcaaaaggctaacaatgaacctcctcattatgatggtcgttggtatggcaagagtgaagaagaacaaaaggctgctgaagcaaagggattgaagccaactattcgtttccacttccctaaagaccatgattacgaatgggacgatattgcacgtggtcatgtttcatttaactctgacaaccttggtggtgatttcatcattgaaaagagtgatggaatgccaacatataactttgccgtagtagttgatgaccacaccatggacattacccatgttttgcgtggcgctgatcacatttcaaatacgccaaagcaaattgctatttatgaagcattaggctgggatcacccaactttctgccacattccattgatctttaatccaaagactcgtaagaagttaagtaagcgtgataaagatacccttcaattcattagtgaatacaagaagcacggttaccttcacgaagcaatctttaactttattgcattcctaggttggtctccagttggcgaacgtgaaatctactctaaagaagagttgattaaggtgtacgatccaaaacggatgtcaaaggcaccagcatacttcgatcaaaagaaacttgattggatgaatgctcaatacattaagagtatgtcgatcgataaattaactgatcggacaatggaattaattaaggaaggcgaaactgaagaagctaagcgccttcaaagtattccagaagatcaattgactgaattgcttaagaagacaattaaagttcaccaacgggatattaataagcttcttgaagttattcaatatgcatggtcatactacacggttcttgaccaatcattcaactatgatttgcttaaggacaacgaagacttcgctaatgaagatgttttagctgttcttaagggcttaaaggctaaacttgaaaacggtggcgatgaccttgattacagtcaagctattaaggaagtgggtaaggacactggtattaagggtcgtggtttatacttcccattaaaccttgcctttactggttcaacttctgcaccacaaatctatgaaattatggatatttattcacgtgatacagatattgaattgcttgaccggatgatcaaagcatttgaaaactaattttataaagttaagcataggacaacagctaatcgatgttgttctatgctttttattttaaactgtcatataattaaaatatgtagttagtaaaaaggggatcttaagtaaaatagttgaaatgagtgaacatatgcggaagatcttaaatgatgttccaacgttaaaagtatttgatttttcccaatacgtttcaaaaatttcaggaattattaagtttacaattggtgaacctgattttgacacaccagaatatgttaaaagggccggaattgagagcattgaaaacaatcgaactcactatgctccccaacgtggaacagtgggattgcgtcaagcgattgccgatacgttggctaataaatatggccttcagtacgatcctgcaacagagattcttgttacaaaaggagtaacagaagggatttctgttgcaattactgcaattactaatccgggagatataattttagttcctaaatttcaagaataagttagccactggactcaaataaataatactgaccaattgattattggttgatggagctgtgatatctcttggtagaaggccttacgatagatatccattgacgaatgtccattaaacatagctcgtggatagtgattcatccaatcattagtcgctatgatctgagcactactatagttatttatagcttcacctttggtaatctccttgcggagaaaccggttattgatctcattggatccacgttcccaaggggaatacggatcagcatagaaaacatgatcgtgaacttgtgttaactcactaaattctgaaccgttgtcagaggttattgtcttaaagatgcgatagtaagcatctgtgcccattttctggcgtaaatttataaagaactgatttactgcatgcgcagttttaccagcaattttactcgtgatattaactcgtgaaaggcgatcagtcattactagtacaacactgtcattaccgtttttctgtccctgaactgtatctagttcccaatggccaatttcggaccgttggtccgcagtttgaggtcgttgagcaatattaggacctaagcaccttttagcttgcggatgagttcgatgatgcttacgtttaggcttttcaaagaggtctaaattggacgtacgaagcacaccctcattaatccattgatataaagttacaaccgactttgggatcagggtgccatcattcattaaatctcgagccttataaataaccgcttgtggggagtaatggtggtcgtcaaactcaccaagcattagctgatcagctaatcgtaaaaattgctttgaagaataatataagcgacgacgaccagaatggcggtgatgttcaagatatgtggcctgaccagcttcataactatagatgtagtaagaatattcgtaaatcttaccattagatttttgacgacgaagttggcggaccgtaccacggttgagctcgttattaattgtttgatgattaactcctaattggcgaccaattgcgcgattggaaagtccttgcgactttaaagtcgcaatcatcacacgttcttctttagtaagatgagcattctttttatgagtagtcaataaactagtagacatggtatcatttaagtgcgtcatttgacggacatcctttcatataggtttggttcacttaatatgatacctgatgtcacgccgaatggcgttttttatttaccaccaactgggtggctaacttcattctataatccaccatataattttagttccaacgcctactttctcaatctacacgcctgatgtaatgattgctggagggacgccagtagaagtagatacatccaagactgggtttaaactaacgcctgctcttcttaaacagtatctagataaatatgatgatcgagtaaaaggaggtattttcgttaacccttctaacccgactggaattgcctatactcaagcagaaatgaattagcagccttaattaagggtaagccaatctttgcaatctgtgatgaaatttatagtgaattaaactatgacggtgaatactcaagcatggctaagatcattccagaccagacaattttggctaatgatttttcgaagtcctatgcaatgatcgggtggcggattggatacctttgcgcaccagctaaagtaaccgatctgctgttcaaggttcatgcatttgctgtgacggatatcgcaacatttgtccaggatgctgcagaagccgctttaaaggctggggacgaggcaacaaaggaaatggacgcctaatatattaaacggcgtgactatatgtataagcggcttacagagatgggctttgaatgtagtcaaccaatgggcgcattttatatttttgccaagattccaccattccttgatcaggatgacaataagctaatttatcaacttgctaatgaggccaaagttgccgtaacggctggatcaaactttggtaaaggtggggaaggatatcttcgctttagttatgctacaagtattgagcagattaaaaagggaatggatcgtcttgcggaattttgtgaaaaagaacaaaataatgcttaaaagaaaagagacagcggtgttaacacatctctgtctctttaatatataagtgaattgcttcaaaagagttattcgctcagtttcttggcgtcagcatcaatctttgcaaaaccagaaccatctggcttcttgctgccacgcttttccatagctttacgagccatttccttacgttcttgcttactaagtgccataataacttcgcctctttttctgaaacgcttcaacaataacagttattaacaaaagtaaaataactgttactaatattatagttcagtctataaaaaatgcaattatgaacatgatcgcttaaataaatggggggcatggagagggcaaactgaaattgttttttctgattttcttgataaaataaaaataaaaaataaaaataatccagatatcctaattaattacaagtattaaaaaaagaaaagagttgctacatatgaatttagacacagcaatatttgcaggcgggtgcttttggtgcatggttgaataaatatatcgagaatggcgctatattagtaataacacgttgttaaacaccttattttaattccatgggaaacttatgggaaaattttatttatctaaagaagagatattcttgtgaataacaataatttataaaagaaaaagcgccaacaaaagtcagcgctaagattactacttgagtaaccatttaattagatgtttaatgtgcttactaggcacaatgagaatcagtacacaccaatgcaagggagtcacctccaaacttgcgcttagtaaagattgattaagtcttcggtgcgcttaaccattgtatcacaatttatttatgttataatatatacatgagaattagtacaccggtgtgcaaaatggtttcagttgattacttaaaccgaaccggttggggcgcttaataggcgctcttttttatttacatttaaaattttaaaaatatgtgaggtaattaatgatgaaaagtaaagtgttaaaagaaaatggtgaaaaagttaatgcaaaacattatcaatataaaatttttttgagtaataaaagtgaacctattgaatataattcaactgaagcagtatattcatatgaagaagtttttgaaaaaatttgtgaaaaatatgcaattaagctttctgaaggaaacattgaaaaaattgaaatgtcattagttgattaatatgtgttgagatttaataatacaaaatttaatgaaaataagcagcaagctttcaatttaaattggaagatacttgttgcttatttttattcagatagggcacaagaaagcaataaatgatatgacaaaaaatcttatgaagtaacaaaagaattaagtagttagcataacctatttactttagaattgcatagagatatagctataataaagtttgttttgataaacgagagtgtgatatagtgagcttgataagttctaaggattatgaacatatcctaagaataaatgactttaattaactacttaactaaaagtagaaaggaaaacttgatcggcgcacttttttattgtttaagtggaattaaatttttattaggtgagaataagatgaatagtaataataaagcaataacctcagtttcggagtttataactgaaatagaacgtcattattcagacggtaaagaatatttctttagaggagaatcgaaagattatggaacaattattccaaatttatatcgtgaattaaataagcttatcgatgattcaactaactactataagcgcttatctattgaacttggaatacaaaatacagataatatctcagttattgatcaaatggcgactcttcaacattatggcgcaaaaagtagacttttagatattacaagcaatgcattaattgctttattttttgcagtagaaaataccgatgaaaaagaagacggcattgtacatgtatttaatggcaaagttttttttgattcaggacatacaattgctaccaaaacagcagctaattttatggatatttctttaataaataatttttataaatattgccacaccttcttaaacagtcgtaaatttcctaaaaacgtaagagaagctattatacaatgctcaacctatggtaacggtttggaatatgagttaaataatgtagaaccttatcccattcataatagtgcaaatgttatagctgagttaaggcatatgacaacttctgagatgatgaaagaaatgccgagttttgacttgattgattttatggaaaaattgaatcaaatcgcaaaaactagagaaaggttaaataaaccattagcaatattttttgatatgcatttacctcagatttatttaagtacgtttagtaatgacagaataaaacgtcaacaaggagcatttataactccatcaatactaagtggtcaaaaaagagataactcaaaaaaacttcaaaagtatatttattcgagcttctataaagcagaaaacaatttaataaaagaatatgtggagttaaagaaaagactagttaacaaaccactagttcataacaagcttcccaaaatagtgttaaaaaataaaagaatgaaattagacacattagtaaagtctaaaaaggagttttctcatcaaaaagagaaaagattaataaagttaaaacaaataatgcataaatttgataattatagattatctggtagtgatttaaaacttaaagaagactttaaatataattgttttcagttgatgtttgacgtgaattatgctggttatcgccagtccataacgtactctgtaaaaaagttgaaactgggttcgataataatagatgggagtagtaaatttcaaataaaaaggacattaaatagtcttggaattaatgaagggacagtatatccagatcttaagcatatttcagattcaataattgaaaatcaacattattaagataatgaaccaattttaattattgaatgcatagccggtttttcatgtggaaaatttactgtatttatatcaaaataagattacataatatacagttttactaataaatggtagtattatgaactcataagaaatgaattaagcagcaagccctctacacggaaggaaacttgctgcttattttttattcaaatggggcacgtttagttggcatctcttttccagtaaagggatcatacatagcccatttatcccaataatctactaattcttggcggaatactttctgagcttctgaaatagaaatatggtcaatccgggagattcgttttacataaggtttccattcttctggaatttgaatactgtctaatgaagcttcttcaagaatatagcctttgaaatcttctttatatcctaaatgatcaaacaagagtttacccattacatttgcatcgtgaataatcttttgggccgtttcttctgtatagacgagcgaatattcaaggggggcttcgttaataagatccgcagatttacagaaatatttattagtatgagggttcttcattcggtataaaatagtcataaaaatagctccttttaaacgtatgttcgatattaatatagcatagttagtcatttttatcaaacatacgttctgagcaatggattaagaaaatgtatattaaagcttacttaacttatcagccaaagactcttccatttctttagtaacgtgtaaataaatttcttctgtaattttactattttcatgtcctacgtgattttttataacgtataagggaactccaagttctgctaattttgaaacatgagtatggcgaaaaaaatgtgtagtaacacttttatcaatttttgctcctgcttctaatcgatggagaaaacgatctaaatgtgatgcatcaaatggacgattacttcgtgaatctttattaataaaaatcaagtcatttggatctttattgaggctaagttctttataaatattgacagccttttgtggtaatagtacttctcgattactagcaattgtttttgcaccgtcagttttcttgactgaaactttaactgtagggttacttacagtccctaatagttctcgttggtgtgaaagggagccatcaataattgctttatacttaccttcttctttaattatgtcttttacataaagtccggccgcctctccacaacgcataccagtcaaataaagccactctaggaaaagcttgatatcattacgatcttttttctcacaagcatgaaggattgcgtgatactcatcgtcagtcaaatatttattttcaatacgatcacgttttcttttaatttcgcttcgccatgttatttcaacatctttgaccggattctttttaagatatccatatttaacgccaaatttatatgtcattgataagtatttcttgtaattttggattgaagcattggttaaaggcttatctggatcataaagcttttgatctaaatagcgattaagtatttctgtagttattttattagcaagggtatcgttacctaagtcattacaaatccgtttaagccctcgaaaggcattatagtaagtgttaaccgcaactctttgtttatagatagttaaaaatttgtcagcaaggtttcgaagtgaaatatctttatctgtgaagtattccttttgcttagctttttcaattttttttgccagctcgatggctgctgctcttttagtttgattattatttttaagataactaacagagacttttttatactttcctgttaatggacttttatagttttcgccaaaacgatatctaactttgccacgtacggtatatttttcaacccacatttttatctcctttagtttatattgtgcaaaacatacgttcttttagagtgctaaataaaaacgccagtagaagaaatagctaattctctatattttttgcgcatcgcaaataatgtaaaattagtagctctatcaacgctttctgtcattgaaataggaattcgaaaggcttcaattaattgctgcttagtctcaaaagtgatgtcgtgtgtacggcaataatctaaaagcaacataattgcaattagatcaccatcgccttcggctttttcattaacactgcaataattacaactaagactaacttcatcaccagataaaatgtgtccaatttcatgagctagtgttagtggtcgttcgcaagctggaaaccagttaggattgtaccaaacgcatcgcaattcaatttgcgattgtggtacccagtcacttggccattggctttcagtaaggacagtaatgttatgttccttagctacaccttttaaccactcaataagatcttccatcttgttcatcaacgtcaccttttttctcatcaattttatttatattcagttagtctatgtattgtaattattatttttgcttattttgtttgttattcattgccttttgtgattctaaaaaggacttaattgaattgcgcataaatgctttttgctcatcgctaatttgaagtccttcgtaagaacgtaatccattaaaataatgatcaatatcttcggaagtaatatcaccatttccgttattagtattttgtacttcttctgggtgccggcgctccttcttatcacttacccccattaaccatccttcatccacatttaatactttagctagctcatataatttatcttgcttagcttcatattttcctttgaggtagtcggatattagttgacggtttataccagttcttctgccaagttcggattgggaaatttttgcatcatctaatgctatttttaacctatgctgaaagctgtcaactttcctaatcataattgtttcaactccttaaagctaattttaacattaaaatacaaaatataacatattgagtaaagaaaaattgacagaaaatgattgtaattgcaacactgtcatgttaaacttgcttttgtaaagctaacatgacaaaaagaggatgatttatttgatttttaattatgataaactgaaggatcgaatgcaacaactgagatataatcaggtatctcttgcaaaagctacaaacattgagcgagtaacattaaatcgaaaaattaataataggattatgtttaagcaagacgagattctttcaattgcgaatgcattagatatagggtcagacgagataggtgtatatttttttacccttattgtcaagaaaagatgacaggatatttaagaataataaggaatttgttaattcgggagaggaggtaattctgatgatggcaaacggttggaagagtagggaacaaattatgaaagattatggctatagtgaaggaacttttggtgatcgaatgcgtgaatgtcttgaatctccatacagcagcgccgttgttagcgacacctctaagtatgcaattattattgaaccgctttatcagaagttccttatgtggcgatcagaaaaaatccgtaatgagaagtcggaaaaatcgggtcgtttaactagaggtaagtatgattaaaaatataaaggattaatcataaattggcagaacttggaaaatttatgagggtactcaaaaattgaacaaaggtgataaatgggtgtggaagaatattctaaacaactttcgttacctagatgaccttaaacggatagaggtaaaaggaactacttggaaaccccatagtacttctccttgaatgtttaaggcaataacctttgcacaatggttgaaagagtatttaagcgagttttcaatgaatggaaatggataacagtaaaagaaagtggggtaggtactatgcctaaaattataaagattaaacataaagcggttaaaaatagccaaattcaaattcctgactatgtatttgatgagggactaactctagacgcaattggactgtatatttatttactaagtcgcaaacaaaaagaggttagccttgaggatattaataataaatcgagggattcacaagagcataatttagaaatactgagtgaattggaacaacatcatttaattgctaaaaaacttaatagcaaggctaactttatttggaaattacttccggtaaagcaggtgtagttttatgccgaaaattaagcatcgaagacgtcaagggtattcaactgtaagcaatactccatatgatgaccgccgtctgcagctcgaatcaatgggtgtttttcaattgctatggcacttacctgacgattggtcatttaatgagattgatattgttcaacgttcagcttctggtagaacgaagctccggaaagcgttagacgaacttgaaagatttggttacttaaaacgaagtcgattgcgtaacgaaaaggggcaattaacagctggtgattgggtattagatgatttagggacacttggtgataattcagttttggcaaaaaagaagagaatggaaagaaaaaagccaaggaagcatcaagtaaaattttactcatgggttcaaaagcctatgttctgttttgtgacattggcttatttctcgccaaaaacctatgtcacgttttcaaacataggtgtattttatcgaaaacctatgtcacgttttccaatgttggataacgtcctactactaattactcatagcactaattactcagtaagtagtaagtatgctgctagcaaagcagcacaaactgatgaacagattcttgcaaagaatcgttcagaacattcactagacgatccaaaaggtatttcacaagcatataatctctggaatgatatctggggtaaaccttcagcgttcgtcgaaaagcaaattagccagtgggttaatgaatttggaattgacgttgtcgcccatgcctttaactatgccaaatggaaagtggagcaagcatcagcagcaggctcctacctagcaaaggtatttgacaattatcggcaaaacaacgttcaaacagcttctcaagcagcagaagctgatgcaatgaatttacatcgttcaaagctctcgcaaagagctaagcaaagcgattctactactacgcctagcaaaggcaaatcatctcgcaaagatgatcttaaaaatttaataaaaagcgaaccagaagctatctgttaccgagcagcatgtttagcaaaaatcaatttaagcggagcagaccagcaggctcttaatgagtttgtcaggcatttaggccctaagctagtcctaaatgcgattgaggttgctaaacaagaaacaaggtaccagtacccttcgtggggctttctcagatcgattttaagacgatatgaggctcagggaattaagacggttgaagacgttaagagcggtgatcgaaatatgcctagcaaaggtaattcaaagcaatataagcgtcataagccgattaaagagccaatgccagaatggagtcgaaaaccgcaagaagagctttacaaaaaggcagacccggaagcaatacgtaagcttaaagaacggattgctaatcgcaataagcggcgaaaggaagtttctggttaagcaagttggggaggattaacgatatggggacgaagaaacaagcgcaaattattactcgactagctcacttaatcacaaaaagaagtgaacggctaagtaatcaagaaagtctgtcagctagcgtcagcattaagcttacacaagaaattaagacttactgttttttgattcgcgtatttcaggaaaattaattcgagggagattttgaaaatgaatggggataaattgattgacaatattttgacgatattcatgcttttagggatttgctgcattctagatgcaatattctttgccatcatcctctttgcgcctttaagaaggtaagcgacgatgaaacatttgaattgggctgcaattttattgattggctgggcgttttactttcagatttttttgattgtggcgattaaacggctaattgaatttctgagcgttaacacagttttatcggttttgggagcattgctgctcagcactattttaggtggcaccctgatgttattgattattcaaaacgaaagtggggaatagagaaaatacaatgaaaactgtgcttatttggacttcataggaggtgagtttgcagtgaaagtaacagtgggtcatcacttacttgaagcgtacccagttgaaaattatgtttatgaagtatcatattgcggtagaaaagagttttaccaagatgctttggacgctgctcattcaacgctttacacaaaagatagttcatataatgcaacaattactaaaattccagttaggcctattagtgaaaagagaattgagaagagactgctacatcaaaagtggagtcttgatgactgggatccatcagcggttaaagaattcaaacaatcaaaactttatctttttagactgtatcttagaaaaataggtcttattccattattgattatgttatatgttgcaatttagattgtcttagcaatttttaagtaaagattggtcgaggaggtaacaaaatggggaaagattattcattaagctcagaattatgtcttagtaattggactgcagaaactcttgatagttctgtaaagcactggatgaaaaacagaaatcagctgtcaagtgcaagcgcttatgtaattagcgatgaagattgtaattttctgaagattgattttgaagatccagtaaaacaagctgatgttctaaaaattaatcggggctctcttggtttggcaacagtatttaagactattcaatctgctaatgctgtcataagttttctagaggctgtaggtgttaaaaaaataaaaaatttgcaagtacgaaagctgcaaggtttattgtattaggattgcgaaatgagggtgagtatatggaatttaaagaacaagaacggaactcgcttgaattagttagccaaattttaaaagatagtccattcgatggctgggtaatcgtagcacaatctccggaggaacaagatatgatttcaatcacttctggtggtaggggaatttcacatggtgcgttagtgaatggactttatgattcagcaaaccgttttgcacaattaaattttaagagtgaaattactaagactgattttattttgacaatggcagaagcgatgggagtctcgacggctaatttaaaatcagctattgagaaaaaaccacaaaatatttagggggcttgttacaaatgcaagaaagtaatgcttcacaagcggggtatcaaattgaaaactcgaataatggttttacccaaataacaaatactgaaagtcaggctgtttttgttcctagtgaactgtcagagagctataaagctttatctcctgaggaacggcaatggtggcttggaattgaacgaaaggttgataataaccggcgtgactatattatccgctttggcacaattctaaaggaaattaaagacaaaactagccgccaaggaaaccgtgataaagacaagattacatttgagcggtggattaaagctcatcatgtttcaaaggggaatgcctataacgctattaacattgcgcaagcatattatcgaattaaggcacagaatgatccggatgaagagctaatgcttgataattatctaagccttcctaagatggcccaattagcaatcgcaaccggaaaggctgatccggaacaggaaaaatatttattacatgcaactgtagaagctcgtaattcgcgaatttggcaggaaatggctaagtcgattagcaagaaaaatgagctcgctaaaagtcaatcaaacaaaattcaaaaacttaattctgaaaatcagcgtttagctaatcgtttagcagacgttgaaaactctcgggctgaaattatgaatgagctgaatgatttacgagaaggaaaaagacacttagaaatgcaactggaggagcaaaaaaacaaggagccggaattagttgaggttgcacctgatgattatgacgaattaaaggctgataaagaagaagctgaaagcttgcttgctgatcgggaagaaaaactcaaaaaagttaaagcggagttaaaagctgctcaagaatcaggacaacaggttgatgatcttgctaaacaagttaatgacttaattcaaaaaaataatgctttgcgaacacagattaagcaacaggaatcagtagaaagtaaacatgacaaagcttttaagcgtgtttcatcattttcatctgaaatgttagcaaatttagtaaaagattttgacctgatgcaagttttacctgaaaccaaattcttaagtcagaaggatttagcccagactgatttagtaaaactagcagaaatgtttgaaagtaagggatcagaaattcgtgaaaaactattagccactcataatagtaaacaagtaattgacggggactttaaggaggcttgagggggagaatgaagaaatgatgtacgtgaaaggaagatttgttaacgcaaatgggcttgaaagaagaccctggtattttgcggtttcctcgaataaattacgggattttaagttggccatgcaactttacaagaaaaaatcagtactagtaatggttagtgatcgacggaaatatgtaaggatagctcaagtggagcctaaaatcatcaaaacacttcctaatagtggaaaatgtgtaggtaatttaattgctatcttaaaagcaagtaacgggcgaccaatcgaattatttaagttagtgcagagttttccagacgacttaaaaaatattacggttgctgaaattgcagctcttcatttgccaagtctaaatcgtaaacttgaccctaatgttcaccaccttcctaaatgaggctagaagcaatgatttatcgtagacgattaacccgagcagaactacgccaacgagctaatcataagatgattagtggatcttggaatgacgaggaagaaaatgagcccgaaacacaactaaaaaacataaaaaatactggtcgatggataacacctattttaggaacctttgtgttgaccttatttatttttttgcttttttggaatttgtatcacttttttcagtgactaaggggacaaaatttatgagttataaggaaaaatcaaatcatgattaggaaaaaattgccaccaaaacggtcgatatatcgacgggagttaaggaaaaaagcattacctaaaaatattctgtataccatgttgttggcatttttaatcttgattctattggtattcttactgctatttgcagcaatgattaagattattttgacttgaacggaggaaattgaagttatgaaagaaattaaattgcggaaatataatcaaggcctaaatcaattgctttattcaactaggttagaaggagaaaacgaactgcgatttaacttttctccttttgatgagggaagttcatggattgcaaatggctcactttccaaaattatgatgtacacgggagttaatgatcaaaacgggaagaaaatttatgaaggcgatattgttcaaataattcatgatcaaaaacctgttataaagcaaactgtcagatttaggtggattgtagaatgaagttagccacccagttggtggtaaataaaaaacgccattcggcgtgacattaggtatcatattaagtgaaccaaacctatatgaaaggatgtccgtcaaatgacgcacttaaatgataccatgtctactagtttattgactactcataaaaagaatgctcatcttactaaagaagaacgtgtgatgattgcgactttaaagtcgcaaggactttccaatcgcgcaattggtcgccaattaggagttaatcatcaaacaattaataacgagctcaaccgtggtacggtccgccaacttcgtcgtcaaaaatctaatggtaagatttacgaatattcttactacatctatagttatgaagctggtcaggccacatatcttgaacatcaccgccattctggtcgtcgtcgcttatattattcttcaaagcaatttttacgattagctgatcagctaatgcttggtgagtttgacgaccaccattactccccacaagcggtcatttataaggctcgagatttaatgaatgatggcaccctgatcccaaagtcggttgtaactttatatcaatggattaatgagggtgtgcttcgtacgtccaatttagatctctttgaaaaacctaaacgtaagcatcatcgaactcatccgcaagctaaaaggtgcttagggcctaatattgctcaacgacctcaaactgcggaccaacggtccgaaattggccattgggaactagatacagttcagggacagaaaaacggtaatgacagtgttgtactagtaatgactgatcgcctttcacgagttaatatcacgagtaaaattgctggtaaaactgcgcatgcagtaaatcagttctttataaatttacgccagaaaatgggcacagatgcttactatcgcatctttaagacaataacctctgacaacggttcagaatttagtgagttaacacaagttcacgatcatgttttctatgctgatccgtattccccttgggaacgtggatccaatgagatcaataaccggtttctccgcaaggagattaccaaaggtgaagctataaataactatagtagtgctcagatcatagcgactaatgattggatgaatcactatccacgagctatgtttaatggacattcgtcaatggatatctatcgtaaggccttctaccaagagatatcacagctccatcaaccaataatcaattggtcagtattatttatttgagtccagtggctaacttattcttgaaatttaggaactgtcagatttaatcacggcaaatttattccagtatgcgattacaggtcgacggaattaagaatcgttggtaatgtttttagcttaaaaaatgatggtgaaccataggtaaagaaggtgaacaaaaattgaaatacaaattaaaatttcaatttgatgattataaaggctacgctgtaatcactttacccaaagaagaaagccttgaggaattaaagcatgatttagctttaggcaaatatcttttgaatgcggaagaaagcactttagagttttcaacatttcaaaaatataacgaaaagcgataccacttagtcctttataaaaataaagatacacgcttaacaattgaaggttcctttaatagtactcatgacttgggaatgaatttagttaaagctgaattattgcaattgaaagaacaaaaacctgtgatgcaggctcaacaacttagctttctgtaagtgatttgatgctaagtaatagattaagtggggtaaatttttaatgaatagatatgatccagaattattgcatcgtcgtagagtgattacttttagtgtattaacggtagccgtcatattgcttataacgggctttctctacggaattggagtgcttcatcgaagtagtacaaaaacgcaacaagcagctcttaaaagcaatgagccggtggtagtaatgtactactctaaaacgtgtccagattgtaaaaaagtagcgattgatgttcataaaaatgcttgggaagtaacagcaactcaagccacgattggtaagttgatgccatcaccatatcgccataagaatttatatttacaatggcaaaataatgaagataaaaggctatttaagcaaaacaatgttaattcagtaccaacatttatggtttatcgcaatggaaaaccacaaccgattgctaatgcgaatggaattgatatttatcaatactcaggtactaataagcaggtaattgctaacatctaccattacttacaaataaataaaccgacagaaaaacagcaggggggtaaccaatgaataaaagaaaatggcgaaaaaagatccaattttggattgataagtatggaaaaagatttgctaaatttaagacttggtatgatgaccacgcgatgcaacgtaaattaattattagtggcacgctctttttaacaatgatagggctgcttgttggcacacgagttgcaccaagcaaatcgcgatttgccgatactccattaaatacagcagagagttttggtaatgatagtaatgccacaatagcactaacttctcgtaaatataatgctaagcaacaattcctggttgcgcgctttaaggtggcaccacaatctggtcaatatatcgatcctaaaaatattaaatttaaggttcgtacattaacaaaacaagatgcttcttatcaagttattccgcttgttaataataactttgtagtagttattgataacttaccgaaaggatacaaagcaattcagctagaagctattaataaacaaggagacagttcgcaaattacttatgatgcttcttctagtattgatccagaatctttaagttctagtgatagcgaactttcatcatcaagcagtgggaatggccagactggagcaggcaaaaacagttacaaatttgtcattaatgaagataaaaaatttgttgataatcgtttaactagacaaacccaaaaagaatatgcggttcaatcattacaagaatcaatcaagttaatgaacagagaaattcgaaaagaaaaaggagctttgactacctatcagaaacaattagctgcagatcaagcagcaatttctcaagcaaagaataatcaacaatatcaagtcgataaagatagtaattctgataatattcagcaagctcaagcagatattgcgactcaaaagcagaatattaagaacgtaaataaggtaattaaacaaagtaaattacaaattaagctttatcaaaaacaaattgatgatactcaatcaggtaagtataagttcccagcaaaggttgcaactaagaagatggaataaggaaaaaagaattaaataaattcaaaaagccagtcgatcaaaggctggctttagttataactaataaacatttcatttttagtttaagaaggttgaaggaatgaaagaatgttaatttttttatggataagcggatttaataggaaactggtaatatatctttttatttttttgagcactttaatatttatatataacctaatggaattattctttataagttttcgcaaaaataaatatttagaatggagtgaaatacaaaaactaactaatttgaagatagttttagtccttaatatgttatttatcattggcctatgaatctggtaagaggaaaggtggtatggatcagttgccgttacgaatgagttctgttagaaaatataaaatttaagtcagactggaataattataatacactatcttttgtcttgatgtaggtttggaaaaaggtattgatacaatgcaaaactagaaattatagcagatattagattgaaatagtcactacttagaactaaaagcaatgaagttataattgaaatgattgaaagaattttggcgatagtaattgctactttaaagcattgtccttcattagaaaatattgaacagagaagtaaataaataatacatgaaaaaatgctcgatcctaaaagtaatacgatggttactacaatccaatatataaaggtcattttattatgggaaaaaccaactactatagaagaaaaagcagaatgctttagaggatgagagaagatttgcataaaaagtggagaaaaaattttgagtagatatatggatagaattattccaagaattagtattagataattaaatttagtctttttcacgggcttagtctctctttattaatttattttggcgaaactttgaaaagtatcagcaataaatatactacaaatgatgatgctttttgtagatttacgtgatgcaaaagcgcatttttctgagtgtcaaatagtcggcagacgagagaattggggtaacacaagaaaaccccgccactggcgggtacctggcttgccaggtatcgttttcccttatgctcattaattagactagcacttaaattttactgtttaagaattaggttggcactcaaaagaaaggacatgattttatgaagaaaatagatggcgaaacacttcaacattttagattagataataatcaagttggcaaggtgcaaaaggaggtaaagaaatataacatgaccaaagcagaattttatcgcatggtggtcagtgattatttcaaaaatgaaactgttgcgaatttaactccagaatatatagatacgttgaagcaattaattgaaattctgaacgtaattggtgaacggcaaaaacgtattgaacgatcagttaattattgtgaagatcatttacggatcttttttgatgaatacgatggtgaggaggaaaactaacatgacaagaactactttaagaatgacaaaatccactgaaagtaaaattaattattttgaagctaaacttgaaaatgatcctgccttaattaaaaatattccatcctcaaataatggcctgattaatatgctattaaatgattatcttactttaataattaatgcttggaataaaagtcctcgaaaaagatacgaaactatttatcaagaatttttatcgacgcatgacacaaaactaaataatttaattaagcatgaacaaaaacaaatgaatcgaattaatgaaattctatatttgttaatggcaactaatcaagcagtcgtccgagttgataaagatgactggaaaaacatgcaatcaatgtttgaatttgggacaaaagaaaatgaaatttatgctaagttatcacagatggtagaaacagataacaaaaaattatttcaaaagggtaaataagttaatcctatttcgggggtaatagaatgactaaaatggtgaatataaaaaacaataaggatttctacgacaagttacatgagctagaggatttggatccagattggtttatccatgttggccaagagagtcgtttaaatacctatattgatgatggggatttaaatactgcagtaaaagatgttattaaggaacgaaatttattaaaagaagttcgagataagttgcaaacagatccgcaactatggagaagtgcagctaaaaaagatgcaattagattattggtaacttactataaaagattcgatttaagtaataaagaaatttcgcaaatattaaatattcccgaaagcacaattcgtcacgactatcagccattgaaaccaggagaaaaaatacatcctaagtttgaagttgaacttcgtgatcgtttcggaaaacatttaagtccaagtgaaatttagttgaagaacttgtcaaaatgtttcataattgaattagaaataattagaatgtgagatttaatatgaattatattgaacgggctgagaagctaatacttttaattacgtttaaaaagcatgatcaacagatagcaataccgcaagagtttttccaagaagaaagtgatgatatcaaattatctattgatgatcatcggattttgattactggtaatataaaattgcgtggtttactccagcaatataaaaaaattcttcgttatattctagacaataatgaaaaaacaaccttttttacgtatggtcttggcatccaaggcgttttagaaaatacgttagaaataaataatccggtaaatatcggaagtgtattaaatgtttttccagcaataacagataaattttcagataatgagacaacgtcaattggtaattttgatatatctttcacgtcagaattaaatggggacgaattagtagtatcgattagatcagaaagaaataaaatttcgcttttttcagctatatcgcatgatactaagaaaggaaaagatagtaacgacatgaatgagctttataaaaaagcgttaaactcgtttaaaaatctagttaaccaggaggaagttgattatgattgctaatacagttaacacgattaaaaatcacgatcacgaaatggtttctgttttttatgtacaatcaaatcaaaccaggaaaaattattttcaagatattgttactgaaactttctatgatataaaatttatatataataatgcaaattcgtcgttaatggatgcaagtaattttaagttgcttgcaaaaaatatgagcgagtattttagccctggcttaattgtgaatgtagaatttgggaaaccagttacctatttagagttaaaaaactctagaatatctgaagagaaactttttgacgaattttggaattttcgtgagaatgtttggtttgatttgccaaaagacttaactaaaaatcgtcatttagctatgggatagtatttatgtttgattggaaagaatatttaaatgttgcgaaagaacttgctaaaaattcagatgaatgtagtcaaagaattgctattagtcgtgcctattatgcagcatttaattatacgaaacatagaagaatatatgggacagaattccgtggccctaattcacatgatgatatgtggagagaagccttcagagatgagtcagaagaaagatattttcaaaatgccatgacactaaaagatttccgagtggatgcggattatcatgctagtagtcataaaattgcaaaagagtgtgaaaaaagtataaaacttgcggaagaaataatagattacgtcgacaaagcttgatgatatgaaggactaatgaaacaggataagcggattgcgatttaatgtataaactaattaaatttattttgctaatatatttgttgaagtcagcctaacagctggcttttttctttggcaaaggttgcttatttagaaaaaatcattgtaattaagtcgtaattatttgattaggagttaacaaatgataaaaaataatcaagcaccagatattatttatacccaacaattcggaattgctaatggagaaaggtatctccaatataccgaacgtaaagaagcaattaatcctagtccagaagatgttgaaattaccaataaaaattttcaacaagatccagatttaccagaaaactttgaaggttatcttggatatactgatcgtaaagctgccacaaaaatggaagatgacctggataaaaaattaaagggggactaccctactttttcgcaaggtgtctatgaattatctgaagaacagcatcaacaattaataaataatttaaaagaggctcaaactaataaatcgatgttatgggctggcgttatatcttttagcccagaatttttaaccaaagctgggctatatgatccgaaaacgaaaaaagtaaatcaaaaattaattaagaaagcaattcaagatgcgatgccaaactttctcgcaaacgaaggattagataatcaagaaactttctggtggggtgatattcatttgaatacagatcatgttcatgtccacttggcaattagtcaacgccataacacacgtccattaaaaaatggcgttcctaagggaatgtttaagaataaatcgattcgtttatttaaatctcaaatccatcatgaattagaaaataaaaaaagtcgttcaaggatgattgaaattgagaaagcacttgatgctactaagaaaaaattaactaacggattaacaaacgatgtaactattcaacaaaaaaattacttacagcaaattgctaatgctttaccggattataaagacaaaagaaaatggcgttcttcaaatcatagcgttgattttaaggaggctaagcaactaacggatcaattagttaatagtttattgcaaacaagcttaaataatgagtatttagaatatataaatctcttaaaagccaaagatgcaattaatcgtaaaaaatatggtcaaaaaattaaagatacggttaatccagcggataaaaaattaagagagtatctcgctaatcgaatttatgatttattaagggataacgagggtggattatagaatgaagttagccacccagttggtggtaaataaaaaacgccattcggcgtgacatcaggtatcatattaagtgaaccaaacctatatgaaaggatgtccgtcaaatgacgcacttaaatgataccatgtctactagtttattgactactcataaaaagaatgctcatcttactaaagaagaacgtgtgatgattgcgactttaaagtcgcaaggactttccaatcgcgcaattggtcgccaattaggagttaatcatcaaacaattaataacgagctcaaccgtggtacggtccgccaacttcgtcgtcaaaaatctaatggtaagatttacgaatattcttactacatctatagttatgaagctggtcaggccacatatcttgaacatcaccgccattctggtcgtcgtcgcttatattattcttcaaagcaatttttacgattagctgatcagctaatgcttggtgagtttgacgaccaccattactccccacaagcggttatttataaggctcgagatttaatgaatgatggcaccctgatcccaaagtcggttgtaactttatatcaatggattaatgagggtgtgcttcgtacgtccaatttagacctctttgaaaagcctaaacgtaagcatcatcgaactcatccgcaagctaaaaggtgcttaggtcctaatattgctcaacgacctcaaactgcggaccaacggtccgaaattggccattgggaactagatacagttcagggacagaaaaacggtaatgacagtgttgtactagtaatgactgatcgcctttcacgagttaatatcacgagtaaaattgctggtaaaactgcgcatgcagtaaatcagttctttataaatttacgccagaaaatgggcacagatgcttactatcgcatctttaagacaataacctctgacaacggttcagaatttagtgagttaacacaagttcacgatcatgttttctatgctgatccgtattccccttgggaacgtggatccaatgagatcaataaccggtttctccgcaaggagattaccaaaggtgaagctataaataactatagtagtgctcagatcatagcgactaatgattggatgaatcactatccacgagctatgtttaatggacattcgtcaatggatatctatcgtaaggccttctaccaagagatatcacagctccatcaaccaataatcaattggtcagtattatttatttgagtccagtggctaacttattcttgaaatttaggaagggataacgaggaacaatatcagaagaataacagtagcaataaaaaaagagacttaatggcacaaattaagtcacaaggtctcactgagaataagaaattattaaatttagaaaaggaaagattgaagaagcttgacccgaagtcaaaagaagccaaaagattaaaaatgcaaattggtttaaggaagtactacattcggcagattaatttagatgcacaaaaagaaagtttagatatgcggattgttcaattgcaaggcgcaccatcaacgaacctaaatcaatttttcctccattctttaaatgaacaaaaagaactaattcaattaagaaagttacctcgttatcgtttaacccaaaacccaaaattaatgcaacggtttaatgtgttaaaaaatcgttatatggatgtaaataaagttccaattaatctggtgactacaaaatcagttttagctaggaagaagcaactagctgcggaaattgcaatgattcaaagtaatacagatgatccatcaatttctttagtaattcctaatcctaatagcgattatcgaataatgaacgcaactgcctattacaagaacttagaagatattttagatgcaaaattacaaattcataaaaataatcaagcatatcaaaatgatttagctagacgcaatgaactcaaccggccacttttcactgaccttaagaaaaaatatgagtttgctcaaaacagtgaattaattgatactgagttggaacatcaattgacttatattaataataatcaaaagaaataccaaaaaaattcaaagtatcaagggataattaacagtaatttgagtcggcttttaggtcaaattaatcaagatggtcggaaacgagttcttgcgttaagaaagcatttaaacgatgaagatgatattgaaagagaagaccgtgaattagaacgagaagaaatttatgaacgatagataatattgctggcgaaatttgttctcataaaaaatatcagtttactaaataatagattaagcttttagggagactgataaattatggacaatgaatatgatattgggctaattactaacttaaccagtaacgttgcaacgggcgttattataggtactaatgaaccatttgagataaaaatgcgagaagaggttaaacaatcattaagccgctacatggttgtggcgattaacttggatcatactgactttatttatcaacaataatgttgtgattcgactttcacataatttgaatgtaaattataattataaaggtgatattagatgaaaaaataccaaaaacaattgaaaaataacttaagatttttgggaaacgttcctgttaaaatcttcaatagttatttggatgactattacgctaaagaaaacgacttaactccaataaagctaaagtttgagtctaaaaaaagaaatatagatttaatacaaaaaatatattggtggattgtaactacattaacggtaggaattattgcaagtggcattatttctcttagaaagtttgctacatctcagcatactaaagatcttccaagtatgattggaactttgctgattattcttgttgcttatctaattttgttagcaataattgaaattattatccagtctgaaaaaaatataatttataatcacttaacattgattaataaaaaaataaagagtatgaaggaagataaaagtcatgaaaagttggtgggaaaataatagcttaaaagtaattctttttgttatatatgaagtgctttctgggtggtatttgataaatttaaacaatttaaataaggcattgaaaggtagaacctattttgatattgcaataaatagttcagctcctttataccttttaggaagtatagtattactgggtgtagggctactataccttttctttttatatcgtaatttgtggcaggcagctactaaagattacttacttttgacagtagttatactcgctatacttacgataataaatatgatttttattatttatatgattcaaaatcctattttaagggcactcttatccgtgtatataattggtggagcagcaatatatgcttttaataattaattgaaagtcagttcaacggtgactggcttttttattacatcaattcaaatatttgtacatatgtgtgtacaaatattaaaggggctgatctaatataaatagaggtgatacgctatggtacaagcagttacaacaaaagatttcagaagatcatttaaaaaatatgctgatgacgtagcaaattataatgaagcaatcattgttgcctgtccagaacaaaagaatgttgttgtaatatctgaaaaagaatataactcttggcaagaaactaactaccttttaaagagcaaagcaaatcaagaagctttagcacattctattaatcagctagatgattctactaaacatcatttcttaactccggaagaatttgagaggatggcagcagctaatgaccaagcttaacattgattttacacaagatgcttggaaagaatatttaaattggaaaaaggatgataaaaaatggtaaaacgaatagataaaattattagtgatactattcgtcatccatttactggtcttggtaaacctgaaccattgcaacataatttatctggcttctagtctcgcaagcttaatagtgaacatcgaatggtatatggagtaacgagtaaagaaatacaaataattcaatttaagtaccattcattatgataaatagatacacaagtttgaggctgagaaaaactaaaattttctcggcctcagtaacacattggtcaacaatggtaagtaaacatctgttttctttacgagcataaaaaaagactatatacttaagttgttatacaagtacatagtctattctgtccatcacttaatagctgatggattttttagtatgtagcagaattcttctttaaaagatctgctaaaaagtcctctggaacttcgtcaacaggtttgaaagatcgaaaacttaaatcaagggaccgctcatgctccaattcaacaacgccatgaatgttatcaagccttggtagttttatatgcaacgggaaatacttttcgttagatgtgattggcataatctttaccataccaccacatagctgattaaaatcgttgtttgatactactaaagcgggacgatatccactttgttcatgtccttcagttgggtcaagactaatcttgatgatttgtccttgctttaagtctttataagattccatttaatgaaatctcccttctaagaaatattttattgccttcgccgaaagcgtgctggctccagcaattaaaacatttctttgccttgtggcttgccccaatcaatttctttgtttttaggctcatttttgaaatatgcttcggtatcaaaaccatcgaacatttttcttaatgggctttcgttcttctcaggttttaatataattttatcgtcttttagttgatacgatactttatcattgttacttaactttagaatatctaatacattttttggtattcgtatagataaactattaccccactttgataaagtgagtattcctttcgtgcttttcatgataaatccctccaacattcttcattaaacataccagctttgcgtagcttagttgctacaactacattatacaccatttcagcgtaatgtcgatacgtagttgatacatagacgtgaagttagcagaatcaacttgtccaaatttgaacgaggtgaatgaaaaaataaagtcagcttaacggctggcttcttcttttggcgtaagattgatttttcgttatctcagttactttgaatgcaaaaagtaactgaggtggcaattatgaccgaatatgaaagtaaaaacgggatggtaactgatgatgcaataaaaaattatttgcaagataatgagtatcagttaactaagaatcctcaagaagcgttatatattttacgtgatgggagcttaatttcgggtaattacgagtacgggtcacggacagaagatcaccgtatgattgaaggacttatttcagaaggcaaagagctttatacgggtgatccagaaaagttttggggtgcattacatgctaagacagggttgattagggtcgttccggaaactcaggaagccttaatcggagttaatcagtctttatcacagacccaaagagaattgataaagcgattggattatcaagtagacgaatatgttaaaatgccaaaaatcaagccaaaacaacgtaaaacagtacttgatatgtatgagcttggtgaagtcctggcgaggacggagcagcaagagggcgactataagggtacttacattgcctttgataaagaaaatggtacttactttggtctagataatcgcgatggtaaattaaaagaaccagttgagtatcatagctatgaggaagctaaacgcgcaattgatagtggtgcaaacttaaaagcttctcttgaattaacacaagaggttaaagatcggaatactttgactgttaaagctaaccggttgttggacgcaacattaaatgatcctgagagttttgaacgaacggtaaatcgaatgggagcgcttagagcgcacggtaataaattcaatcaaaatggcaatcaattattgttagctaatcatcagctagggacggtctatgcacctgcaagtgagtatcaaaaggataattcgttaagtaaaattaattttcaagagttacatggaactaaggtctttgtaccaaaaatcaaaaaaggaataatcgaactaaatccggctacagtttatgcagtcgaagaaattggtaaaaagcatcccgaattgatgaaaaatgctttagcaatcgctcgggaaaatagtcgtttcttaaatcagtcagctgcagatcggcgaagacagacaaataaagtcctcatattgactaaccaacgcctgaataatcctaaggcagccatgtcgcttcatattgccaggtatttaaccacttcttctgctggcttaaaagaagaatttaaacttagaaatgatgagaaagaattatttaagcaactatcagttaatgaacggcaaaaaatctttaatgaagcacaaaaattaagtcgtaagttgaatctaagagtaaaaagagaattttttaaagaaaaagagcataatcaggacaaacaactgaatagacctacaactaagtcacgtgaacgatagttggcaaaagataaaatgaagcaagcctgcttatatgatggaattacacacagcatataagggggctttttaatgtctgaagatgaaattaaacatcctttggcaaccctaatgaagcaaaagtatggggttactaaacaaagcagtttgagattaaactctgatgattcactatttgttgtttttcgaaaaattgcgaactatatttataaaaatggagaatggaatgatcaagattatgcagatgccattaaatcctacttggaaaatactgacagaggtaatactgacaaaagagaaattgcaagcatagtaaaagatcctggtggccaacaagtactaagaacaaatcgaaatacgtatacaatcaattataaagatgaaaatagtaaaaaactttatttcattcttgatcaagataataaatcttggagccatcagggggataattattataaggtctatgaccccaacgttacttgggtaattggaaatcaaaattatacattagggtacggtaagctccttaacgatttaatgcaggaatggcaaagcactaagcaagaggttccgcttgatgagtttaaggctcaactttatcgattaacgtctcataaatatgctaaaaagagttggcaaacgcggtttcaagagacagctttaggcaatttgagttatcaagaatttatgaccatgacagaaccgattgtcgaaaatgaggaagatttattaggaaaaggtcctgaagaattaaaaagaatctctagacgttttaaagcatctgctttacagaataacgagcagcttgcggaacagtatttaggacgtagggttcgttttaggagctggcaaacggcttatgaagcaaatcaaattaatcgttttatcaaaaattaccttgaaaagacttataacattgtgcggcagcaacgctacgaaagagatttagataaacaaactcatgctaaatcttgggaaactaaaaagaatattgataaagccacccaacaaattatggataggagtagtcttcatcgatattttagtaagatcgaattggataacgatgttgatttgaaagcatttggttattttgaagatgaagtaaagcgcttgatgagccatatgccattagcaaatgacaaaaatattttacgcttacgtaaactgggaaatcatcgagcgcttggtatgtatgtgccctcattagatacaatcgttttagaatttaggaaacaaagcgaagtacgtaaagactcaaacggtgatacggttggaattagctcatttattcatgagtatggtcattatcttgactatcatttaagtaagtggcctttatcattagaaaataatttcaaaccactgattacgcaatatacaaaaaatttagcaagttccaatctgtctgatagtaaagttgaatacttaactacgccaacagaagtatttgcacgaggctttgaattatggtcctatgaaagtgctaagctacgtggaaatttaattggtcaagaaaaagaatataacgctaaaacgggagctatcgaatatcaagcctttgatagtggtttaagagaacgattatttaattattttgatcaaattccacagctaaaggaaattaagccagaactagcaattgatacgtcacaatttgaaaaagtaaagccgttagaaacaaaagaagatttaagtgatgcgcatgtacttaaagatttatcggttaaggctctgcagcgatggacggataatccagagaagttagaacaattgattagtgttacggggacttcaatgcaaatgaataatcctaatcgcttattagcattagatcaattgcaattggagaaactgccagtaatggtgccagcacgagaacttaaacggttgaaggtaacgccagcgcaaggagttcataaggtgcgagggtttgtgcagaaatcaaataaacgttggatatcatctgaaatgtatagtttgcccgatttattaaaacagaccagtgataacttagaattaataaagcaattaaaagcattaggcaaaccgcaaaaacagtataatcaagaaaaagttaccaaacttttagatcaaactagcctgaaattaaaaaatagtgacaatacaattactaaagcatttaagcgtgctgaaagatatgtcttgcttgattcattaagcggacaggttaatcgacggccatttcgctttactaacgaggagcgtgaattattaaataaaggtgttcctgagttattaaaagttatgtatttacgaataactgaagcagctagtaaagaagaaaagaatttgcggatgaaacttcaaccaacaatatctaagaatattagtttaccgcttgacagatccaagacaattaaacgttaaacaagtataattaagaaaaaagagcagaggaagttatatgatgagtgatgaattagctgaagtagaatactttcgttatggggtagcgcaggtaaatttaattcctagtggtcggaaagttaaagtgattatcccagatgagaaagctgataatattgaagttggcggaatttatagcattagtgatgattatcaaacactagattgctgaatggaatggttaactaagaatattttatgatcaaataattagtgaagaacagatctgtccttaaatttaactaaaaaggaacgaaggtggttttttgaacggttcgcgaaaatgttcagtattttttaggtcagtactaaatcttttgacttattttagcccacagaactctgataatcgaaaagcaaagtatttttacgtcctgaaaaatgattatgagggttattctttgcaaaaactaaagggtattctgattgactacgaagtttcagtaagaaggaatgaattagctgctactgctattttggggttactgttttccgcactgctgtcaggactagggaaaagtgtgttagcctggtttcagactgcaacagagctttatgtattaaggttaatttcggttaagacgattccaaaagaatatgtaatgaaggccaatctgctatctggtatattggtagccattttgattattatcttggctttacttatttatcttgtcatagcaaatatctcgcgtaaacgcagaatctgtctagtgttaaaagaagttattaaggaaaaagaaaatgaatagttatcgtgcgcatgattggttacatgaacctgaaataattgctgaattaattatttctgttttatatgttattacgtttataatttacttaattcttctcggtatctttaacaaaagaatggaagacgaaggtcttacagatgctcttgtaaataaaataaatattttaggaacatcaaaaagtattcttgatgaaggaggcggtaaatatttaatatgggctgctctaatgattcttgcgtttattattgtaatcataatcttaatatgtttaagtaaccattcatatcataagaaaatctcgttagttattattgtagtatttattatagtttcaattatcttgtttgtaattttatggaacatgattaatataccgatacttaaagcatttataatttttacgggagccgtaggtataggcagcgcattaattggaacttctaattaaataagggcaaaaagtgggatgaggcgatagcaactagctaccgtcttttgttttactctttttaggtatttatctttacattgatgtaaaatagtgtaaaatatatgtagcatcaaaataagaggtgaggctaatttgaataattttcaaaaggcaattttcttgttgcagaatatcgacaagcttaaacagcttaatgtaaagcgatgactcttactgagttctctaaataactgatgtttcacggccaacgttgtataaatacattcagcatccagaaacaatgagtagttcgtttgtaaataaagcggccatgctctacgacaaggttgttaaatttcaagatattcttgatacagttcagcgtgaagataaacaatttaagactaccagcaggaattgattaagcttttagagtaatgtagctaatattgaagttacagattatacaaaagcaatcgcgacagtaattattagtgacttaaaagaagaaaattcaagtctgctaaaagcgttaagtaagcaattaccatttaaaccaaatttaaatgataatttgtcaaaatagtatttacaaattcgtaaatggtgttaaaataaaatcgtaaataatttaatacaatgactttaagaagttggggattatagactatgaatagtaaaaagaaaattgttacattagcaggagttagtttggttgctactgcaggagtagttgcttcaacaaatgaggtgaaagctgatacaacttctgataatgctcaggctgcagcaacgtcacaaacagctgaccaacaagcacaagctaaggttgatcaagcacaaagtaatgttaattcagccagccaagccactagcgcagcccaatcacaactagatagtgctaatgcggctaacagtgcagcacaagctgatgttaacagtcaacaagcgattgttaatgatgcacaagctaagtcgatgctgctacaagttcagtaagcaatgcacaagatgctgaaacaaaggcacaacaaaatgcagatcaagcttcaccagctaatattcaaaaggcacaagatgctattgctaatcaagaaactcaaattagtaaagacaccgatgctattaatgacgctaacaaagccgttagcgatgcacaaagcacagttgatgcagcgcaaaaaaagttaatgatgcaactactgctcgtgacaatcaacaaaagaatgttgatactgctagtgatgcagttaagaatgctcaagctattcttgacaacagtgatcaggctaaaaaggaagcccaagatgctttgaacaaggctaaccaaaaagttgctgatgatactactgccgttaacaacaaacaaactgatgttaacaatgcagcagaagctaagaagaatgcagatgaggcattgaagaacgccaatgatgcgcaaacttctgcacaaaagaataaagatgctaagcaagcaattgctgatgaggcaagtgtagcattagctgatgcaaatactgcagtaaaggacgctcaagctaaggtagatgcaatcaacgacaagttagcaaactttaatactattactttgcctgctggatacaaagatgacttaattgcatactataactattttggtaatagtaactataatcaagatgaagcgaataatttagcgcaagatcttcttaaatatcgtgatcaggcaatgagccagaataaatttaaggataatttaagtgatgatcgagtggtagatattgataatcttaattcaacagatcgagcagagcttagccaatttgttgcttcacttattaatcaagttcggacacaaatgggtacaaatcttgtgatctcatctcctgcagcagatgattatgcagaacaggtatcacaaaattataataaagataattggaattctgcagataacggaaagcatgatcaaagtgctctcaataatgcaactgatcaacttaatataagctggaacggtgaaaatatggggctggatcagtcaatttttacaacagactataccgtattgactgatggaaccaaattaccaactggaaataaacaaacaattaatgatctcaagcatttgatttatgatgattttatttcaatgatgtttgatgatgcagattcagcttggggtcacgctactaattttgctggaattgataactttgcagctgaaaagcaagctgttggtttttctttagataagttctacaatacacactatgatttagttgaagcaaatcaaaaagttgaagaaaatagttatacattgccttcaattaatgcactaacacaaaaattagctgatgccaaagacgatttatcaatcaagcaaactgatcaagcatcaaagcaaaaggctaatgatgatgctcaaaatgctttatcttctgctaatcaagtactcgtagcagctcaaaatgatgttaaagataagacagctactgctcaagaggctaatgacaacttaactacagctcaaaatgatttagctactctgcaaaatcaattaagtgctgatcaagctaaccaaaagcaagctcaaactacttttgattcgtttgatgctgaccttgcaacaaagcaagcaaaccttcaaaaggctactgatagtcttaaagcagaacaaggacgtttagcaattgctcaagctgatttagataatgctaataaggctttaagtgatgctaataacaatttagcccaaaagaaacaagtagttgaaaatgataatgaaacccttaaagttgataatgataaactagttcaactacagaataaccttagtgacttacaaaacgctcctaagttattagctgctgctaaggaacaagttgcgactgctcaaaaggctttagctgatgcacaagaagcttacaatgtagctaatgataaattaactagccttaagcagactgctgctggcactacaacaaatgtttctaaggcacaacaagctcttgcagaagcaaagaataatgaagatgctgctaaagaagtattggatcaagcacaacaagcattaactgaattacggcaaaaagaagcacttgctaagcaggttgcggaagaacaagctaaattagctgctgaaaaggaagctaaagataatggctaccatatcgaaaataaccaagttgttgacgctaaaggtaatagtgtcaatggctggacagttaagggcaaccaaattgttagtccaactaatgctactgtagatcccgctgtttctgtaaccaccaatgtcaatgttgatagtaaaggtcaagtacaaccacaaactagtgttactgctaatagtgttaagactgtagctgcaactgaatcagcaaatccagtagcaactactactgtgcaaacccgcgaacaatacaagcaacaattgaagagcaataatcaattaccacaaactggtaataatgatagtgctgttctttcacttgctggagtagcacttgcagcaatgttgagtttgttcggtattaagaaacgtgaatactaatttagaaaatgtaagtattattatgtaaaaaggttcaaccaaattggctgaacctttttgtctaaaatttaaggagaagttttatggatatgacccctgaagaatttgagaatgttgtaaaaagacttcatcaagaagctcaagaaagaaatttaacctacgtgtttcctaaaggtcgaatctttaatgtagaggaagcgtttgatgatgattattcatatgcaaagattaatatcaaaaatgggaaaagaaatatgttttcattggattgaatccagctagaaatggatcacccttagcggtatataagaaaagagctaaagctaaagaacctttggaaaaaatcgttgctaacggttctgcatggaatcgtgcattaaatcatagtggaaggttggaagattttaacgagttaggatcgatatattttcttgatatatgtgcaaccggaaccttacaagcaagtgatttgaagcaagttcaagctgaaagctatatgaagagtatagagtttatctcaaaatatatatctaagtatcttagcaattcaaagatagtattatgtccaggtggaaaagcaaatagtaagaagattcgtaaagctctctatgaaaaaattataaaagaaaataaggatcgaatatatatttatgggttatcaagaggagtacctagacatattattgggagcaagggtactgatttaagactcataaaggatgatcaaattagtacagtttcaggaataaagtgaacttagagtatcgataaaaaagctgtgtttctttgtcaagatgaataaaacacagcttttttttaagaagtcatgagtaaatgtacgaattgaccaaaatgtaattatcttttagtatagaattgttacttttgcgtaatggctataagaagcagttatattaaaaaggagcataaaactatgtttaacaacattaaaaatataaataaagtgatggggggggggtaacgccagccctctagctgttacatttttagctactgctttaaaaagggcggtggcttaaaatgactttactaaccgaagatcaagttcgagatcgggcaaagcaaatattacattttgaaaatgatgctaatgcttttgctggaactgggcaattaacaagtttcaatacactaggtaaaagtttttctcaaaatccttggaagagcaataataataagcctgatggatggtacttacctaaaaataaaaataagccggccttaattttagaaactaaatctagtactaaagacttagacgatgtggcaatacctgagttgcaaaaaaatatgtcaattgtacttaaaagatatccaaacgtaatggggattgcttataatggacaggatgtgcgtgtttttcgtaatgaggatccgggaagcgatacatttattgaagctcaattatctaaaacattagagaataaggattattacattaaagtctttactgataaacctgttgatgtaaatgaaatttatacattgacggcgagaattaataatgctttgcattttaaatttggcattcgtaatttatatgatcgcatgatttttacagcgggagctttagtcgccgtacgttatggcgcaaagcttgaccctgatgatgattataatgttttacagacttctatcttatccaagctgaataaaagtctagaaccttcactaaaacagaatttaaaacttaataatgtaattgaggtttttcgtgatattcaaacgaattttgacccgggtcaagaagccattaaaacctttgttaataatataaataaaattagtcaatctataaattcaagccactggcgtggtgaagatgtaatggctattttctttaatgaatttaataaatataaagctaaaagtgataatggacaggtttttacaccacaacatatagctaattttatgtatcgtttaattgatgttagtatggatgattctgtactagatgctacctgcggttccggaacttttcttaccaattcaatgtctaatatgattactgaagctggtgggcctgatgctaaaaaagcaaaaataatcaagcaacaaaagctttatggaattgagtttgataaaactatttttgccttagcatgtgctaatatgatgattcataaagatggtaagactaatcttaaccgtgtggacgcaatgaccccagaagcagcaaaatggattcataatatttcatggctagatcctgaaggtgagcgggataatgatgaatatttaatacagaatgataatcaattgaaacctcaccatataaccaagatattaatgaatcctccatatgaacataagtatcatcctttagatattttaaataatgtattagataatgttccccaaaatactgatgctgcaattcttttgcctgattttaaacttgaaaaagaagggaaaaagaaagtaaagcatctactagaacataatcgattaacaaagatcattaaactacctaaagaaacatttaatagtgaaggtgtttcagtttcaatttttatatttgagactggtcagccaacaaatcctgatgatggaatattcacctgcgagattgcggaggatggacttgaaactgttaagaatcagggacgacaagatataaaacaccgatggtcagcaattgaagacttttgggttagaactattaagcgttgtgatacacaagcagataaatcttgccaatggattacacctgatttaaaaaattataaacaattaagcgttccaatccctcagaagccttttgtgatctatgatgaggactttatgaaaactgttatggactatgaaatgtttaaacaaaatattaatagttcaaagttgcaagatgctttaaaacaaactgtactttatcagagccaagtagtagaaaataagcaaaatattgatattaaaataaagaagggagtaacaaatgaatcaattgaataatgatagatattggaaagaatttaaattgccagatctagaaataaattcatatggtactcctacacttcatttacgacaagttgaggcagcttctgaaattgatcctgattgtgaaactattaattatattacacgtggtaaatttaataatggtgtaaaattaagagtcattaagaagccaaattttaatattattcctaaaaatactattagctttggcggtgaaaccggagagtttttctatcaaagagaaccttacgttacaggacgggatgtttattatattgatacatcaaaattaacagaaaatgaagcgttatttttattaacaatagttaggaaaaaattgcacactcggtcaacattcaatactattatgactgcttcaattgttaacaatacttcatttcaattacctgtaaatgagcaaaataagccagattggcaatacatgaatctatatattaacgaattacgtcaaagggcgttagaaaaattaaacattatcaataacattaatattcaaccaacatctatcaatagccaaaattgggaaaactttaagtttacagagttatttacagtaaataactctacaaatgttttaagacgtgaagtcgatttcggtaccggttcaatgccctatataacagcaagtagtatgaataatggagttgtgtcttatattgatgcaagcaatttacccgttgatgaaggaaactgtttactaattggaggaaaaacttactctatttcatatcaacgtcaaaactttgtatctaatgatagccataatcttattatccgattaaaacctgaatataagcagtatgcaaccgagaatgtttatttatttttagctagtatctttagagcatatagttactattataattgggctaatgctgttaacaaaaataaattaaagtcatcgactcttcatttacctataattcaaaaaggagtgccagattggcaatatatgaatcaatttattgatcaaaagaagagccaagtaaaagataagatagaagcttttggtaaaatttaatgagatttgatagtgtaaagtaaggttttctaaagaaaaatctgtattccttgttaagatgaggaacacagattttttttagtttaaaggggagtttacaataatggataaattatttacggactattatttagaatggattcatatgtataaagaaggatcagtacggcaagtaacattagataagtactacttaactcatcgagaattacaaaaaaggtggccactcatgaaagttaaaagcattaatcattataattatcagaagttaattaatgaatatgctgaaactcatgaatacctaaccgttaagggatttcatcatcattgtaaagcagcaatcatggatgcaattgaagatggactacttgtgaaagatccaactagacacttaacgatcaaggggaagcgtccaaaaacaaagaaaattaaatatttgagtttgttagacttgaagcgtttagttaaccagttggacttaaaggctgatttaaatatagattggctaatcttattgatagcaaagacagggatacgatatgcagaagcattaggaattacagttaaagactttgattttgaaaatcatcagttgcaaattaataaaacatgggactacaaatccaaaaatggcaagtttcaagagactaaaaataattcttcagtaagaaccatcagtgtagacccgattacatcagaacagtttcaaatgctaactaaagatttaaatcctgacaagcccatttttctacaaacaggtaagcgaatatatatttccactattaataatcacctcaccaaatattgtagaaaagccggagttgatgttatttctgtgcatgggttaaggcatactcatgcctcgttattaatctatgatggagtttcaattcctagtgtggcgaaaagattgggtcattcaaacacgatcactacgcagcaaacttatttacacatagtaaaggagttagaagcgcgagataatcaaaaaatactagaaaatatgattcgattgtcttaaactttgtccaaatttggacgaaccaaaagggaaaataccttaccattttgaatttaacttagtaattattcggtttaaattaggaaagattacataaaactgtaaaattttggcttcttactcagaaacgaaataatgctgagtacgataatgcaatgaacgagtacaatgcagaaatggcaaaactgaatcaaggcgcaaacgcgccggtcattacaacaaacagtgttaatcaagctttgtcgttaaaaccggaaaataatgcaactgttgatatcgaagcactaaatccaagaattacatttaaacgagttgaagaaggtactaagtatgctgggtatcagatttttgataaaaataatgcatatgtcaacaatattgacggagaatttctacgagttacctatacgaacttaaaaaactcaacatacaaaggatcaaaaattagcaaaatcgtagttacttattctgacagcacccctactggcaatcgtattactcaaagcggattaaatgctgttacagaaggtgctaacgataactttttagtagttttcgaagacccagtgcggggagatatgcattcaactactgtaacagcaacttatcagtattacgatgcaaacggtaacttgattgatttttccggaacaaacaatgcatggctttcagtaggatctctaaactttgatcagggaaatgattatcaaggaggtaaaaatgaaggtaatccaacaagtgggattagcgaaggcgttaaactgatttccggtgctcaaattaaacaattagctggatcatcaattagtgttcatgatgatggctgggcttatgccggtttcaataattatagtggtactggtatgaataatggtatcaatactgataacggtggttctggctgggatatggatggatctcctaatgcatactatggtgcgattgtttttcaattaactggatctagtgtttctttacgacagggtttagtctcatggggtggagctgatattgcttcccagtataataatcagttcctaaataatgcttggtttactgctggaacaaccttacctgaaacacaaattaaacaaccaattcgtaagacttccgaaacacactatcactacaacccatccgtcattcgcttataatcccgaacaatagacgagaatagtttctttcttcataccgcaaaataaaaagcgccaaccaaagtcagcgctaagattactacttgagtaaccaattaattagatgtttaatgtgcttactaggcacaattagaatgattggccaaatatggctcatggggttcacccccagttgcacttataattagagattggtagtctcagagtgcttaattattgtaccataaaaaaagtatgttataatgtttatattagaatgattagccggagtgcaaaacggaatcagttggttacttattccgaaccggttggggcgcttaataggcgctctttttgttttaaaacactaaatcatctatattgttcggaaaatataagtcaatagcggatgggttgtagtgatagtgtacttcagtagtttttcgttgtggaatactaccgttttgtggaataacggttgttaattcagcccaagcgcccgaaacacttctatcagggaaagcattaagatcaataacgccgtcttttcgcttagttcgagatgcctgaagagctaaatcactagttgcatgtgcgtgccatcgtagagataacgttgtaccagttaacttgataagtccagcaccataatattgcattggcgaaccagttttatcccattcatctaaattatatggtgagccccactgcttggattgattatctgaatcagcataaaagtcgttaccgttatgaagcttaactgatgagcctgctattgcaaaggcttttccaccagcaagaacttggcacgcttcaaaaacatttccagcattttttctactccattatccatatagtcataacgaccgccattaagagacattggtgaaatgtaagcactgatttttgaaaaatcaattaatttaccctgatcatcatagtactgaatatccgtatcaatctgtccagaattataatttataaacttgactggattattgaatacatgaacagattgcaacattttatttgcagttgaaccaatagattgaccattacttaaagttactacttccttaacgatggcatgtttttgaccagtttcgtctatataaaacgaatgtgtaaggttagtgaaggttactgtaccgattaatccggtctgattatttccagcagaagaaaagtctatcgtatcatatttgctgccatcagcagcaacatgattttttgtaatcagatattttgaagatatatcaactgaagcatttggttcattttgcaaaactaaattttgaacaatttcatttggattagcaccatttggattacttggtgtactatttttccattttattaattcttgctgatattcatcattgttttgtttctgagtaactcaattaattatctttataatttaaatatttaatggcaattgtacgaatgattttagaatgatttcttaaatagtttgaaaaaacactaaattttggcgaaactttgaaatatagaaaaatagaataaattctcctttgaaaaataaattaatttgcaaaggagattttttttatgattgtaagacaaaaatcaaaagttattccaatcgaaaaatcatctacacattacaagatgtataaaggtggaaaattatggctaacggctggtattactacattatcaatggcaggtatgatggttgctgcaggtgagttgcagacagcacatgctgatacaaccacaacagctaataacacacagcaaactgctactggtggtaatgcgataacggctactacaagtggaacatctggacaagctggcacaattacgcagccagttaatgttgatcattcgcaactgaataatgctgttgatcaagctcgtcaagctggattgactgtaaatcagcaaccaacaactacacagactgtaaatcaggatcaagttgatgctgccaagcagagtattcaaaatgatgaagctaagcaagcgcaacagattcaaacgattactcgacagcatcaaacagaagtgtccaatgttaataactttaacggctctaagggggatacttcccaacttgatgctaaggtaaaagaggcacaatcaatccccggattaactgttgtacatgatcaagatcaaaccactgtaaaaaaagcttctgatacacaaggtatccaagaagcggttaataatgctacccaaagcaataatgaccaagctcagagtattcaaaatgctatcgatactcagaaacaaaactatgctaaataccaatctcaattaaatgatttagcaaaagatcaacacgttacagggcaagttaattgggataatggtggatacatgaatgctcatccaacttatgatattacatggcactacgacttacagcgtaagaaagttgtcgtaactaacgttcacttaacgattccatcaggattagcacctaaaacaggtggcggcttctgggacacttatgtcattaaacgtgcaattgatcctgcaccagttaaagatccaacaagatggccttttgggaaacaaggagatgcaactggtgtagacggaaactcgttaaaggagaaatatttcccaggatcacttgccttctacgcgcacaataataagacgcaggaagaagtaaaggctattaaggattatcatggcagttatgatgctatacagaatccagacggaacttggagcttaatcacaatttatgatcgttctggaacaagcattcagcatgattatccaaggtatggagacccagcgtgggccgaatggggtgaaactgcaccggtggctactgttacgttacccaaactaaataccacttcagccaactatcactacaacccagtgatggtacctaagactacaattggtgatcaaccagtcaattaccaacttcatgacttaaatgttaagactacgcctgaaaagaactgggttaatggtattcaaagcgttaacaacaaggtaggaatcaatgacgatgtggtaactaccaaagttgatatgaattatcttggttcaaatcagattgaaggtggtttgcatagtcttaaggttactgacgattattccaaatttgctaataatgttgactatgctggagcacaagtttacgagaatgaagaacttgcgacaggtaattatgatattactaataatggccaacaggttacggctacacgaaagaaccctgaatctgctaatggtggtaaagtttccttagtaattgactttaagattaagccaaatgttaaaactggaactgtctttgaaaattcaggatccggaactatcaatgatcaaactgtaccaacgaatgatgcacaaattaaaacctatgaacaagaaacagtaaaacactggatggaaggcaagaatattgtcgatgataaaactgaaattaacggtgatattgttactactcaagttcatatgactttgccagaccaaagtactttaattgcaccattaagttatgtgtcaattgacgataactatactgattttgctgataagacaaatcttctttcttatcaattatgggaaaatggtgctaatgtaactgatcaatataatattactaacgaaaatggtcatttaacggctgtccgcaagaatgcttcagcagctccagcaggagaagttgttttaatcggaacattcaagattaatgataatgttcctaatggtactaagttagtaaatcgaggatctggccggctaaacaatcatacagttgagactaatacgccagcaattgttacctttacgcaaagcgttgataagcattgggtagaaggttccaataccgttgatactaagacctatattgcagatgatgtagcaactacaaacattacaactactttacctgaccctaatagtttagctaaaccattaacatacctgtcaatcgatgatgattacactaactttatggataaagctaaattacaaagttaccaagtatgggaaggcaacagcaacgttactagtgaatacacggtaacagataacaatggacacttaacggcacggcgaaacgatccaagcaaagcgccaggtggcactttacgcctagtagcagtttggaaaattaatgataatgttccttctggtactaaactagtaaatacgggttctagtcgaattaacaaccatacagtagaagccggcaaaccttatgtagtagtttatacacaaactacggacaaacactgggttgatggtaatcaggttgttgatgataaaacttacgttgatggtgacaatgttaatggtcaagttactatgtccttgccaaatccaagcgatttagccaaaccattatctaatgtaattattcgtgatgattacactaaatttgctaatgatgttgactacaagtcagcaacagtaactgaaaatgataatgatgcaactgatcaatataacattgttaacgagaatggggtagttacagcaacccgcaagaaccctggtgcagcacctgctggtaaggttcaattaaatgttatctggaccactcatactggtttacctagtggaacaaagttagttaacagtgggtcaggaacgattaatggtaaaactgtaaatacaccggaccgaacaatctatactttccataatgatagtgataagcactgggttgaaggaaaccgcaaggttgatggcttaactcagattaatgatgatttgattcatgctgaaatctctaccgctttaccagatccaagccaattagctaaaaagcttggcgaaattcaattagttgatgattggtctgacttcaaagacaaggctaaggttactagttatcgtgtaactgaaaatgataaggatgcaactgatcaatataacgtagtagttgataataacggttttgttactgctactcgcaaagatgctagctcagcaccaggtggcattgctaaactattggttgactggaagatcaatcatgatgttgccagtggtactaaactaagcaatactggttacactttgatcaataagagtcgtgtagacgttcctactgtcgacactgttacctttaccccaaagacagataagcattgggttgagggtaatcaagacgttgatgataagacttatgttgctggtgatgaagtgcatgggaatgtctcaatgacactgccagaaccagagcagttagctaaaccactttctaagattatcgttattgatgattatcgtaactttatggataaggttacctatgagggtgctaatgtctacgaaggcgataaagacgtaacttcactctatgatgttaagaatgaaaatggaattgttactgctactcgcaaagatgctagctcagcaccgggtggggtagtttatctgaaagctaactggaaacttaatactgctatccctaacggtacggtcttgactaaccgtggttcaggacagattaatgatgatctagttccaacacccgatcgtaacatttatgtctttacacaaacagcagaaaagcactggaaagctggagaccaagatgttgacagtaagactgttattaatgatgatgtaattcattcagaaatttcgatgtcattaccagagcctaatagcttagcaaaatcattagaagatgtagcaattgaagatgattacagtgacttcaaggataaagttggactaccaacagttaaactttatgaaaatggtcaagatgctagtaccgaatataatgtaaccttaaaggatggcgtgattactgctgttcgtaaggatccatctaaggtgcctgcaggtaccttaaccatgaacgttacttggaaagttaatcacgatgtggcttcgggaactaaattcactaacaaaggtaccggaattattaaccgcagccgcgttaagactaatacaccagatgtagttacttttactccagaaaccgataaacattggaccaatgataatgatcaatctgttgataatatggtcttcatagctggtgataatgtaagcagtaaggtttcaatgtcgttgccagagccacagaacttggctgaaaagctcaagaaggttcaagtaattgataactttgcgactttgcggataaggttgatcttaaggggtattccattaccgaaaacggaaaagatgctaatgatctttataactttgaagtgactaaggatcatcaaatcattgcaacgcggaaagatcctgcaacgacgccaggggaatcgtaattctacgggcgcaatggactttgcataaggacgttccaactggaacagttcttactaacaagggttctggtcaaattaatgatgacctggttccaacccctgatcgtcaaattaagacttatactcaagatacagataagcattgggttaataatggtggccaagtagttgataataagcttgcaatcaatgatggagttgttactgctcgtgttgatatgacccttcctaagtcctcaactcttggtagtaagattcataaaattcaattaaccgatgacttctctaagtttgctaaagatgttgaagtgcaaggagtccatgtctttgaaggtgataaagatgtaactgatcagtatgatatttctattgatccaaatggtaaggttgttgcaacccgcaaggacccatctaaggttaataatcatcaaggtgaattgccagttactatgcaggcagtaatgaatgctaaggattccttagatactaataatttagtcactaaagcaactggtaacttaaacaataacctttttgccgctagggccggattattcaatgcttcctttattcaaactcatgtatcttcagctaatggcaagatcaattcacaagttgatatgcaacttccagaaactagcgaaggggtaaataaggtagcagtaaccgacgattatactaacttcagcaaatatgcccaaccaggagctgttcatgtttatgaagatggtaaagaagccactgctaactacactgtttcagatgatggtgctggtcatgtaacagcaactcggaatgacactgaaaatcttaatggtggccaagtttcaatgaaggttgactacaagatcaagggtgatattcctaatggtactgttcttgaaaatcacggttccggaacaattaacgatgagacaattccaactaatacaccatcaattactacctatacccaagaagctgaaaaacattgggtagaagatgatcaaattgttgatggccgggtagttattgatggatccgtagcacatgctaaggtcactactaccttaccggacccatcacaattaactgatccacttactaatatgtcaatcaaagatgattattcgaaattcgctaaggatgttgatcttactgatgttcaagtccttgagaatggtaagttagcaactagtgagtataaccttgaaaaaggtgacggttttgttatcgcaacgcggaaagaccctgcaaagacaccaggcggtaatgcacaattgctattaacatttaacattcacaaggatgttccatctggtactaaacttgagaatgctggatcatcgacaatcaataatcatacggttaagactaatactccttggattgaaaccttcttaccaaatccaacgaaggatgtagtaattagtgttgataatcaaaagggtctcaatggccaaaagattgagttaggccaacgttttgattataagttggttgggtcacaattgccggctagtgtaacagcgcttaatgaatatggttttcacgatgattatgatgaaacgcatgatcaatataatgcgggttatacagtcctcttaaatgatgatattacgttaaaagatggaactgtgcttaagaagaataccgatgttacaaaatacacaacacaagttgttgatacagaaaatggtaaagttgatattgaatttgataaaaacttcttggcaagcgttgatctttctaagtcatcgtttggagcaacagcttatcttaagatgaagcgagtaaagagtggaacagtacaaaacaagtacacaaactcaattaacaacattgactttagttctaatactgttacaacaactacggaaacggaagaacctaagaagccagaaacaccatctactacacctaagacgccggaaactccagttacgccaactgaaacaccaaagacaaccccaacaccaactcctgctccacaagtaacgccagtacaagaaccggttatggctgcagtagcaactcctgctcaagttgccactccagcaccacaacaatcaagttctgcggctcctcaagaagcattgccacaaactggtaatgcaaatgaaagtggattagttgcagctggattagctggattcctagtaagtctaggcgcatttagtcttaagaaaaagcgaaattaattagtttgttttacacataaaaatttcatatctcctttaaagtaaaaaggctcagcagtttgctgggcctttttgcgtgaacagtgtcaatggcgaaacttctttttttctcctttagtgtaatagtggattttaatatatagagcaattttgatattggacgggattaaaaatggataaaagagaatttagcctaaaactttatcgaatctcagataataagttatattacttagtaactgcctattctcaaacggatgcaatagactatctccttgaagaattaggacttgagacaagggataaaagcaactattcgattaaagaaattgatatttcaacgccaggccttatttataatgaaacaatggtcatgtcaattactcagcaaaaggaatacagcgctagtgaggtagcaaaaatgattgggactactcctaatatgatcggacgaattgctaataagttaaaaataaaatctaaaacatcatgtaatcaatatggccggtgggtttctagtaaatcgcgttattcaagtaaagaaataactcagtggatgtattatcaaacagcaattgacttaattaggaatacatttagcaaaaagaataagaagattagttatcaggaatcactttttggagaagattatgaaaaacacaattgatcaattatcattaacccaattaaaattcagtcaagccggaatgaatagagacactgctacttggttagctttagaagctaaactgccattagaacaacaatgtgcttgcatagaagccttagcgttagagcctaatccaaatgagaaggttaaaagattaattattgctagaggatttcaacaacggcaaaggcaacgaattcttaacaggtaatgaaaacaattaagtaaattaagttactgtgaatttgtacataattttcttaaatttaattttcagacaataaataaaaaaagagcgcctattaggacgccctctcaaccgactacttgtgagctagaaagcacccacaacacacggccttatcatattagtaactatattataacacaaaataagtatggcccaataactaggcacatttgagcaggcgtaggaaacctgactagtgcagagaggaggcaactccttatgacgcatttgtgtctaataagcacattaaaaagttaattaaaaaagctatgcgactattcaaatagctttttcagcggtggtatttggttactgtcgcttttttattttcctgaaagatagataaagaataaaactacaatagcgattaatggtgcgaaggctagtagaaagaaaaatttactaatcttccagaaaatccaaagaataaaagtaaagccagtaaaaaagaatacgttggagttaaaattttggaataaataatcccatccaaatgtggcgaaagggtaaaaaagggctagaacacatagaattaaacaaaagataccatcttttttatcagtaaagttataaagaataaagataacaaaataaactgatagatagtgagaaaaaatataacctttatctattctgccaatagttctgttatataaatttaacattgatgtaaccgcccttctatttatttgttgcctctattttacactttatttacatttatgtaaatacaaagtttacaccagttaaagtgtggcgaaagatactaaaaagctcattccaatttacttttgaagaaaaagttaaggagtgataacccatgattcgagttttctataagcctaattgtaaagcttgtctaatgactacgcatttttttatcgttcaccacatcaaatttatcgatattgatctttctcaaagtcctcagtatgctaagagtcttcatgataaggggcatcttaaggtgcctgtagtcattacagatacagaagaatggtcgggatttcgtcctgataaacttaatcagcttctccaaaagcaacggctaatgcgggtggagaggtgatcaacaatggctgcagttacagaagagaaattatcaaacgtagataaattgtgtcggcaatctattcagaaatatttagatattaaaggaattccttatgaaaaacaaggctattatttaagactaactgatcatgattcgctagttgtcgatacaagaataacctcacagaagccatacgagactttctattggaattcgcaaggcgttggaggaaatctgtataattttttaagatcatatgaaggactagaaaagaaaatagcactagatcaattagaaaaactagctccagaattagcaaaggcaccacaacaccattatcaggtagttgaataccaaccagaaaagtggccaggtagtcggcaaaatcaacaaatgattaactatttcactaaaactcgtaagttagacgagcgcttgattcaagttctcattaaacatggcttaattaggcaattacgtaacggtagtgcattcttttcctggagagataaaaatatgaaagaaattggtggtgatgtgcagggaacgatagttgatcataaaagatttgggaaacgtggcaccattaaaatgattgcaaaaggttctgctagggaatttggctttcgttttaatgccaattcaaaaaacgatgacactaaaaagctatatatttttgaaagcccaattgatatgctgtcctattttcaaatgcatggtaaccaaccaggtgctaaaacttttctatcgcttaatggtgctgctaccaaggtaaataccgttagtaattacataactaaatttggtgttccagatgaaattcatttagcgttagatactgatacagcaggattgaagggtattatacgcattaatgggaggcttgaaacacttagaaaagaacaaggttgggataatatgaaaattatagtagatcagcccaacagcaataataaagattggaacgatgccttgaaacttaatgacaagcaatactatgctgagtccatgcacgactttgctaatcgtaagactaaagaattaggagtaaaacggattcgacaaattatggatgaaatgctagctggtaatatgggaaacagtaaagcaataaccaataaagtaaatccacaaaaagctagttttaaacaacattttgaagataagcgaaaagaacgttaaagttcaaatgatcacgtcatgaagaaaaaattcatggcgtttttactttgtccaaatttggacgaaattaggcgaaactttggtaaatcaatagctactgtatcttaaattcagttgaaataagaaaatcaggtgaaattatgtttgattatttaatcttaaccgaaaagaaatcagcatttgataactttgtcgctgctcttggtggagaaacaggaacagttaatggccatacatatcaactaactcatgctcaagggcacctactagaattcttagatccagtagatcaagttgcaccaaacttgaaagataaatatgaatcttgggagttaaaagatttgccctggaacttacaagatttaacatggcgaaaaaaagcgaaaaatggatcagcacagaaaatgattaaaaaaattgctaatgagagtcgtcaagcacaagcaattgttattgcaactgataatgatccaagcggagaaggtgaacttcttgcttgggaaattattaatgctatcaattggcgaggaccagtttatcgtgaatatcatgatgatgaaagtaaaaagggaattcaaaaagcattaaggaatttacgagatatttctagtcagaaaaaagatggtgactacattaaagcggttttacggcagcgatgggattttgcgtctatgcaagcaacaagggtttctacaacattagctcgtagtgaaggttatcggtaaaagttattaatcaaggacgattaaagtcagtaatgcttgcttttacttttgatcaactgcagcgaatcaagcattatcaaaaaaagccttactacgaagttaaatttaaggataataatggccatgtctatgctcgcaaagtaagaaaagaagacgaagaactaattaaaaagattcgtcatgctgatattaaactagcgaaacaagaacaaagcacttactcatcgcccgcagaagtcaaattattaagttgtacacgaaaaaaacaggtccctaatacattaattgatatgaccggaattgatagtgcaatggcagcaaaggggtattcttctgcaatggtcgaagaagtttaccaagaactttatgaaaaacattatctatcttatccgcgaacaggagacaaggtgattactaatgaccagtttattgagttgatgaataatgctgatcaaatcgcagctgtaattaacgtcgatcaatcgcttttaacacaccgacaaccaagagaaaaatttgttaaagactcagcgactcatggggctaatcggcctggtgaaaagattcctgaaacaa

SEQ ID NO: 50 - DNA, 165920 bp, synthetic construct
  misc_feature 1..165920: note = Based on Lactobacillus reuteri
  source 1..165920: mol_type = other DNA
atggcaactgagaatgcaatggcaattgtaaaagctgctcgaagtgataataaaataactgctaaagaaattatagaagaagtattttcagattttattgaattccatggtgatcgtaaaggaacagatgattcagcaattcttggaggattggcaatactttcatctacaccagtaacagtaattgcgactaataggggggaaacagttggtgaacatttgagtacacattttgggtgtccaactccaggtggctatcgtaaagctttgcgtttagcaaagcaggctgcaaagtttaatagaccaattatatttttagtaaatactcctggagcttatccagggaaaacagctgaagaacaagggcaaggatctgcgattgcgcaaaatattatccaaataagtcaacttccagttccaattattactattatttatggtgaaggtggcagtggaggtgcattagcattggcttgcggtgatcaggtgtggatgctagagaatagtacatattcaattttatcacctgagggttttgcctctattttatggaaagatggatcacgtacagaagaagccgcagaattaatgcaaatgaccccaaaagccttgctaagacataaggttattgaaggaataattccagaaagtaaagatcacaaagtaacatgtcgagcaattgctaatattttagataaacagttacaagaattaggaaaactttcagcggtagatttattgattcaacgaaaagaaagatatagaaaattttagttagtatagtaagaggagagaatacattacggtgcacgacttattatcgcttaatagaattaaagaattatataaagagaaagcaatgacaaattgcaactttttttactttaataaagtagattctactcaaaaaatagcaaaatattttttagaccatttaaatatcaataaaccatgtactatttttgctggaagtcaaacgagaggctatggtaaaagaaataggctattttattcaccacaaaattcggggatttatatgagtataattattccacaatacgaaatgcaaaatgaggatattggtttattaacaatttcattagggagtggaatactagaagttttaaagaagtattatcctaaaaaaattttttatttaaaatgggtaaatgatattctattaggcaaggtgaactactcggccataaatgaccgagcttctgggaacacgaagtagtatttaggatattacacaagtattcttgctacctaacttacagaactccgttcttttaccaaggctagttcctagccaacggcttttaatcctttttgcaagatgttaactgccgcattaacatctcggtcgtggtgaacgccacactttggacaagtccattcgcgaacttcaagtggcttcttgccactgttaaagccacaatgcgaacagatttgactggtatagtttggtttcaccaagactagttgtttgccataccaagcacacttgtattccagcatcgtccggaactgataccaactagcgttagcgatcgacttcgctaagtggtgattcttttggagattcttggctttcaaatcctcaataacaatcacgtcgtactgcttaactagagccgtcgttagcttgtggaggtaatccttgcgcttgttggcaattcgttgttgataatgggctttaacaagtcgggcgcgttgccagttctgataatcattgagtgctaacttggtatcttggtggttgtgattccattggcgaacggcaacggttgcccggtggcgccgcttgctgaatttactttgccacttcgttacttgatgttctaacaatttagcgttgaaggtaccgtacttgacaccatcagaactaatcgcaaggtcggccaggcctacgtcaagcccgaccatttgccccgttttcggtaaccgttcaacggttgtttcaacttgcagggagaggtagtaacgacccgtcgggtcataactgaccgtataacgcttaattttggcctcaccaataagagtcgttttactcgtgcgtatacttccgagttttggtaattgtaaccgccgcttggcaagtaccttgcacgttgatcggccagtgtaggcctgataggccacatggcggctcttaaagcggggatagccaccttggtgcttaaacaatcgtttaaaggcctcggtaagattatggttcaccactaggaaactggtggaatcactttccttgagaaagggatattcacgcttgagctgtttcaagaggtagttcataccatactcattgacgaagtggctactgggattgttttggtaacgctccttagccatactgagcatttggttccaaacgaagcggtcattaccaaacatttgccataactgatcccgttgggattggttagggtacaagcgaagtttgatccctttaatgaccttgttcattctagttccacctcctttttccgttgatcatcaatgtacttggcaacggcttgttcattaacggccccaatactttcaacatagtaactgggcgaccacaagtgacggccctcctttttccaatagcttcgctgtaattccggacattcccgaaatagctgataggcagtaccgcctttcagccaacgaacaatattcgtcaccgataatttgggtggtgcactcactaacaagtgcacatggtcgtccttcccaatttccatgtgggcaatttcaaagccatatttagcggcgatctcatggataatccgtttgaaggcgatctcgacccgaccggtaaggactttgtttcggtatttggttccccaaataatgtggtaattaaggttgtagaccgatgttcggccatatgtaagtctgtttgtatctttcataccaacgattataccataattcacgtttcccatatacgcccgtcgggcgtaaaaaaggggggcaattcatcacgtccttaaaagaacgtgtttccttgccccttttcaaaaaagttgccggaattattatagaaagacaattagatcttaatggaattgattttcttattattggtataggtataaatttgataacagctgtttttcctaatgaattaatggagagtgctacttcgattgccagtactatcgatatcgatttcgacaaattaagtgcggatttagtagctacagtttttttagtagtttctaactatagaacaaaaaagtttttagatagttatagaaaacacttaattttaacaggaaagaaagttaaagtaaggctaaataataaaactatacaaggaacggttttaggagttagtgataacggaggcttagtattaaagtcagaaaacaataaaattcaaacgttaatgagtggtgatgtaataaaagttatatattgataaaatatggacctttagctcaatgggtcagagcaaacggctcataaccgttcggttataggttcgagtcctataaggtccattcttatataaattgtctagaactttttggctatcagcaaaaaaagttaatacaaaaagagctaactttattcaattacttatttttcttcccaaatatatcaagccagaggtgataagctcgcttttcatcacttgaaagtgagtttatcactcggtcgatggcctgatcgacagtttcgttctgagtagagatactcagtgcgttttctaacgcgttaattttcaatactgtttgcttttgcaaccgtaccgtctggtaggacttacgcccgctcttgggcgacctactgggcgttttttggttgtcgttgcagtgctgctggtcgacttgcttgcggcctcttccagttgctgacttaccttactagggtcatagctttcttttggtttagcaatatccgtcttaacaatcggacggggaactttctgttctttcttcttagtgcttttgtcaaattgaaactttgccattattgattctccttaatacgttccacaatttcgctagtgagctggttataaatatagtggaaccgactatcatgcatatcgtatttgataagattcttttcggcgattccagtccggtcgtagcgcttcaaacggataacttggtcaaacagcatatccttgccaaagtcctcttccgcgtccttaataatctggttgtccagtccagcgttatttttcagtaagacagcaagcacgccgagaatatcaaagttaatttcagcgtaatcattgtacatttgctggaggtactcaaagaatgtttcagcgccatccagtgacctttgctgcttttgcaacacgataatgatgccatcgttggtgtagatagcggaatcagtaaagatggaaagtgttggtggcacatccaggataatgaagtcataatcagcgtttacttttgcaagctgcttggtaaagtatgaaatccggagctccttaatccggtccatttcggcttgtagggaacggctgttgctaatatcaacgttccccttgtctagcatatacttcatttccaaatagtcaggataatttttgaagtcctcagaggaggacagtaagtagagattatccataatctgggtaatcgcagacgggatattctcctcagtcagcgcgaccatcattgttttgttgattttaagctccttgctgttttgtaagccatatgtccgacttagtagttgagtggcatttgcttgtggatctaaatcgcaaacaagggtcttataaccttgccgcgcaagctgataggcagtcatgacggagttcgtcgtcttaccgactccgcctttcatattgcccaacgtactcatgtagtagcttggtgaccatagatggccaccccagtattgggattgtttgatttctggatgtctcttgaggaagataaaagcatttcgacctttgagggccttaatggcgctgcttggcactttactgggtggacaactaatcagtacatgtacgcggtcgggcataacttccattttctcaattacaatgtcattatcatcagccaccgagtgtagtatcgacttcattttatttgatgactgttcagtcacgaaggtctgattacggtaaagtcattaatttagctactgcagccgcatgtgcgtcttccgttggcaaatccatgtctctagctgccttttagtacacattgaaagtctcctcatatcggatgagccactccctgcggtcggtctcattttactgatatgagaagccttttcatgagagtggtcgcctgttcagggggcagggagtgggagcatatataaagaaaaaccacctagctaaaaagctaagtggtcgaaatagtcgctaaaccatgctataatattaccagtacgaatgatgaatattatattcaacaattaggctgatagtttagctggttgcgctcttgttctggtgtactgcaatacaccaccagccaagcgcattagagtacaccctcaaggatatcagcccctaaatcttacttgtgcattggtggcagccagtgcacctttttattatatcattttatggctggttatactagctatattcttacagccacaagggatttcgagctttgttgtttagccgcaatcaatttggtcaagcagtttctctcggctaacttgatccaatccaagatatttcagtgtcattgcttcgctagagtgattgagcagtgacattactaagccgatattgtagtttgattgcgtgtaaactcgatatgctccggttttacgcatggtgtgggtaccaagatagttgatgccaagtaagtcgcctgttttggccataatcttatagaattgtttttcagtgatatgttggtcttgatgagtgattgacgggaaaagccactcagattgtatattattgttctgaagccacgcataataatccagtaaatcctgtttaaccggttttaagtataaaatattgggtttattagtctttttatcgcgaatgtacgcgtttttcttgatagttccatcgtcatcaaagatttcatttcgtctgagagctaatacatcactcactcgaagcaatgttgccttaccgatttggaaaatagtgtagtttcggcggccatagcggaaattattgagtaaagtgttctggacttcatggagaatgttggtatctttgatgggtagaacgtgttgtttcatagtgattgccctttctggtgttcgtattataatataagtataagagatggttgatgaaattgttcatgggtttcaccaacacaaaagcccctcggtaatccgccataattaccaaggggctttaattgtgggttaagctgtcactacttgcctatcgcttgcgatggtttaaccaatacgccacgcaaacgggaattaccgctaatgataattgtgctaggtaattcaaaagaggattagaaataatgtgttacaataattacagaataagaataagtagcagtgcatgctagcgaaattaaccacttcgcaccagctggtccaggagcaccttaactaggtgctcttttttattatataaataacttttcagattttattactagttgtatgattaataacagttaaataaagaaattgaggaattataatgaaagcatttcgtgaagcaatgagttggattattcccattttaatcgggttaataatcgcattagtaattaagcagttcttctttcaaattgttcgggttgatggaccatccatgcaaccaaacttacaaaataatgaacgagtattttgtttgaaaactgccaagatccatcatggaagtgtcgttgtatttgatgctaatggcgttgatccgcaagtatcagttaaaaccgattatgttaagcgagtaattggccttcctggtgatactgttagctctaagaatggaaatatttatgttaacggtaaaaagattaatcaagactacattagcaagagtcaacgaacaaccggaactggaaactggacattgcgtagtatttcagttcagaatagttggctaaaaaataatggtgccacaaaagttccgaagggtgaatactttgttcttggggaccaccggagcgtctcaaatgatggtcgttactggggatttgtacctaagagtaagattgaaggggttgtaaaagttccatcatggactggaacaaagacgactcgcgaaaatattaataaagaatggcaacacttctatgataaataatatttagtaggtagactttaatctaccagtaataactgcccaagtcttttagttaaggcaatttaaattaatagcttaaattttgatcattcatttacgagcatatcgtatttgaatgattttttgtttccggaagcttcaacttattaattgctaagtagcgaaatagttatatctggggatgttttcgagggtcaggaagggtggaatttagatcacttaaaaatgcactatgtagcttttatataacttttatgtagcttagttatttacaataactaaaattcaatatatacttacagtgtaaacaaaaaaagcacatcacaatttgtgatgtactttattagctaaggctgttcatcgtaccttgctatgctttgtttagtgtttgttcttggtcctgctgcaacaggacttttttagtttaaatgacaaatgattgcaacgatagtcatacaaagaattgcaaatccaatgagaccaattaaagcaagctggactagttgtgataatccgtgcattgcttctacaatctttgccaatccgcttaaaggattgaacaatggtatgctcctttttaatctcgaagcataccttactaaaaaagtataactccggcatagaaccacctcactttctgattcattcaaagtgaacatagcaaggtgttaagccttagcatactttaagtatacttattagttatttaaattacaatagttatccacaggctgaccaatttttatcaaaacatcacaaattgattctgctaaaataaatacataatgataaagatgccggcgtgcaaaatggattcagttcgttacttaatccgtaccggtaagcagggtgccttaatcggcatcctgtttttgttacaataaaatgataaaagagattagctatagtaaaatctaatctcttctaataagtgaattatattttctaaagtgcaacaattttgcaacaaaattggatctatctgttgttttttatgaactttagtctaagttgcgcaacttacatataaggctaaagcgctaagcaatgggggctaggagaaccaacctactatatgataaataatatttagtaggtagactttaatctaccagtaataactgcccaagttttttagttaaggcattttaaattaatagcttaaatttttgatcattcatttacgagtatatcgtatttgaatgatttttttgtttccggaagcttcaacttattaattactaagtagcgaaatagttatatctggggatgttttcgggcgtcaggaagggtggaatttagatcacttaaaaatgcactataggaaaaattatctgctatctgatgactagttatttcaagctcattattccagtaagggaggcctaatacctgtggaattgaatacattccctttggccacctatctaatagctgtgaaataagagatagagggagttcgtcaagctgtagttgggaaatgaattcggcaacattttgttcatgtattgctatatttagggaatcgacttttcgcggttgtttatccatccactggttaagttgaaagtttatgtttctctggggatgagtaattaaactttgcaaactactatgttccagatctttaaaatgagtgtatatagtttttgcgtattgaacagttaaccatcttagttcacataataattgatagttattatctagggaccacaatggttgtaaaagaacaggttgtcggaaagtataataatcattccaatcaatcatatgcttgtaaaggtttaatgtaactgcagtcatttgacgctcacgatgtgggtaaacaataaaaggataaccatatttgtcgctgctatgagctaaataggtaagattatatgtttgcataatggtattaagctcatgttcatggccaaatagaatcggttgatcgtaataaacgtttgctgctggataaaagaagtgaagatatccccaaatttcctgttggttgatacacttcggtggtaaataacgggggaggcctttaccttgcttattaacaagagacgtattaaacatccccaatggactgctaaaaatatcaggatcgttaagtgctgctttaagcattttgcctggaacaaaattaacttgccattcagaatgattattaaagtactggcagaaatcatccagtgtcttagtgtaatcaaataagtaattgctaccaagcaagaattcagctacatcaaggtatgcttcactcactcctgttaaacgcacttgtaaattagatgcgtgttggtataaatcagatagataaattctttgtccatcaattgttacataagtttgcataattcgattagcgatgtttgataatttgcgtccaacgttattaaactccttaacttttgtagttcgaagtgatccatcggttacggcaattaccatttcaatttccttatcaggattttgtaaagcatattcaatgtagttacgaacctttgatgcttgtcgatcgttagtctctgttcgattatctaattcgataaatagttcatgtctccggtcgtgtctattaaaacttaccatcatatctgcaataaaaggcattgcatcatgttgagcaaacttattggcaaattggcgattaaaactccggaaatcaaaatcctccaaggagaaagtagggttgcttattaggtcgatagccttatagaaatgtccaatgaaattatcagagaagcgcttgggttcagaacgatcaaataatgagtgtggctgttgatctacataattaattcgtgatcgataggaaacggattgatgttgctggtagttagctaatcgcaatagtacctcaatatgagcattagttaatgtaaattgagagaattgcttatcttttagcaaagcttgagatagatcactgccaaccggaaacgagtgggggaaagtagagtccaaaactattgtttctttctctttgggcttatttagtgctgattgagaattacttaaaggtattttctcgatattagagatggccggccaccggacggcccaggatttataatagtaatttgctatagtttgatggtcatcggctaccagaagcttattaacatggtcaggcaccgcctgaccttttaatttaccctttctaaggtagaagcgaggatatttaccccacgctctgtggtaacctcccccataattagaggtattattaggggatgataatgatatttggcgaattttagtgatattcccgggtaatttgcgcaagaaaagaggggaagttatccactcataggagtttttaaccggtattttaacataagtatcggctttttttaggtcgatttcatgcttattatcattgctaaatcctttaatatcaatgcttttagacctcttatatagggctgaagaacctatgttttggctgtgttgatcttgttcctttcctgtggagatattgcgggaattatgtgctaacaccccgttgctttggaggtaactagtctttttcggcgttttattattatcagatggaggtaaagacattgattggtcccgttgattagtaaaataatgactatttgggttaatatttgctcctaaaaatcgagacattacacttttattatctttcttttcatgatcattacttgttttcgattgattggtaaaaaagggacgcgttttatcatcaaaaaacgaggattgattagtagttagtttatcttccatatcttgaattccccagagtttttctaagtttaataaacgttcatcaaatatcttttcagctatcggttcttcagtagacttcttgtcttttttattatgtgtatagttctctccaggcatcctcccaacggttttatccttcttttcagataaaccttcatctttacttagatttgccctagagtgcttctgtaatgcttcattagttacacgatctgatcgactactacgattgccttttaatagtctgcttatctgaccttccctaatcgttgtaataaggtgtttaactgcagatacagaataatgaaaatctgctttagtttggggacgagtagatgaaatcatttgaacatctgttcgcccagtggcttttcttaaatcgtaaggcttttcatccttgtccaagagattcttatcagttcggacgggattttgctccctttggttggctgttgataaaacagaggtcggtagcacggttgagttgtttagtaccctgatcaaagtggtataagcatcccctaacaagctattacatggcagtattttatttacttccaggggatataaccgccagtaatgtctagaccttaactgttgtttttgctcatctctaaatacgtggttgtctcctgttcccacttgctgattaattaaccattctgcatccccaagtaatcctaagagtctgtctaataaaagactattattgtttgtgagaatagggagattagcggtgccggtcatccctgaattattatcattgttacctggatgcggtgaatctttactcgaaacaaaatggctcgctggtagctcactatcaaataaagttcgcggtgcggtatattcggataggctagtctctttggctttacaagaagataaacctaaatccattactcgaattttttcggtagggagattcactaataaatgaatttgtagagaaagtggcaacgcaaataataaagaatcatagatagttatggaaccataacatactgataaaagaagattaagtttggctgttaataacgatataggattaaaattaacggtgttgatgttggatagacgttctttatttttattatcagtgagagtgttaatgtcgttttctctatagctatactgactatgtttagcggggttaatattatttgataattgactattatatggattacctcgtacagataattctggttctgtaccgttaactagtaagtatttatctagctggtttgttaggcttactattccactaccactggtacttgtattaagtaacatttttcgtagactttctaattggtttttatccaacgtaatcgtagaagtctttgctgcctgttttagtggctgggagacatcgttctcccagccttcagccaccggctggatttgttttgtagatgccggggccaccgtgcccggcttcttgttatcagttgtgccagcatcgtctggcacattaagagtattatttacttctatatttccattaaacattggattgctgtaaatagtgtgttggttgtttaaagtcatactactagtcatggtaccaaatgtacggtacttaaaagtagcagcatatagaccttgcacaattacttctattgcttgctcattgtggctattaagactaattacaggactttcacttgcttcctttgtccataaatgttggtccactagaagttgtctaccattcttattcaatatatagacagttcgtaacagactatttgttgtctgttttttagatttacctacttttttcattattccaccataactacaccattcacgtagaatagaacgtgtcaagatggttggataatggctacagatagaccagagcatatctatttggtttatgttagcaaaaccaagatctccaatcatttttagtaacaataagttagatttagtcaaatttataggatgcttatgtcgtttattggagtattggatcatcagactacttccttccatatagtttatttatgtcttaaagtagcactttaatttgagagtttggttaagtactccaaaaacgtgaattatcaatgtttaagtgacacaaagatgaacgaaatagcatcgatataccactttatttttggtgttatatttttgattttgaaaatgtaagacaggaggatgctttttgaaaaaagagataggaaaacaaggatcaactagagctaataaaattctgttacgttattataaggcgacacattatgcgacttaccatgcctatcgaaaaggcttaacaagggcaacgagattgatagaattggcaattttgattttgatgatttcgactatcatttcaataattccggctacaagaggattggccgattatctattatcattgagtggccttattggagttatctattttctagtttattatcggattaatgctaaagggcgttatcttcggaaggactcaaagaaagcaatgagaatgattgcaacagatggctttgtacccaaatcatggaacatttatgatggggtatatagttatgaaggactagagtcgatagaaatagctttcgtgcaggatcatagctatttgaaagatatctggagaatattgaaggataatcgtcctacattaccacctgctaaaagagatttagaagcgttacgtgaatatattcttcgtctacaacaactagagcttcaagatgaactaggtattcaaattaactacattggttatggaacactcgatggaaaattagttaaacaattaaaggaagcacattttaagctagaagaaatagacgatgattttattacaaaaccaggccgtttggattatggagctgctacaggaacaataaaaaacgcctttaggaattatcctaaagactttaaagcgtatatcatatcttttgatttccatacttatctgaaacttcaagatgagaaaaaacatcaggataaattacgtgcacgtcgccgtactcgattaaataaccttgcatcgtctgaggcaaagtagtcaaaatagtaaagacgatgctataataaaagtgtacgtttttatgtgttttaactttttaatagcaagtagtctattttatttcgtttctgttttgctaagtagcattttgaatttttattgtttatgtcgtttttatttaattttttattttagaaaaggatcagctttttgtcttgctggttcttttttattaggattttaatttatgtctaactatttaattaaattatgaggattgaagcagctgcattggtagctgtttttatttttaactggatattggaggaatttattatgagtaatattgaaaaaaaggatattcgttttattgcagtcaattttgatgaccaaaatgttaaggattttatgagtaacaatacaaatgcctttactgaaattgacaaacaaaagtttgatcggtcagttgatggtttaagtactagctatcaaaatatgaacaactatgtttcattaattggacggctagttaatagtcctagaacaattacacaaggtgatcattcttttatatatgctagtttatcggtagaaagtgggtattttgataagaaccataattaccaaaagcatgagtttgttgttccgctacgattaaacatgaagcagaatcgaatcatgcttgctcaagctggagacatgcttcaagttacaggtcgaattattcgcttcatcggacaagatgaacaagatctgcagaaagctacctcttattattatcttgatgttattaattgtggtctattgattggtctttcaaccattcaaaaaaatgtagtatacctcactggaaaactacaaagtgatccagaaattattctcaatcattcacaaagcgatactaaatttgtatcagcaaaaattgtaattccagatggttatcgtgatggtaatggagaattccataagcatactgaagttattatggttaggttttacaatcaaattgatgagataatgactgcaaaacaaggagatacagtgcatcttaccggtaatcttagaagttggggaattgttgacccgcaaaaagatacaatgagggcaacgcagtatttgtatgtaaatgttaaaggatttggaattatgtatggatcgtcaattcgtaaacaggttaaggcaaagttttatcctaaaccaagaccacaaactacaaataatcaaggaactcaagatataactaaaattcttgcaaatttaacgccagctcaaaaagcagcattgtttagtgaattaagtgtgggtaaccaagaaactcaaccggcagagcagcatacatctactactcaagtgacatcaaatgatgattttgcaaatcaaaatcaacaatcaatggtagaacgtgagttggtttctgatcaagagaattatcatacttctattcaatctcacactcctcattcaaaagataatgaacgagagaaatttatagaattaagtgatgaagatttgcgatctgcaatggagaaattggattaaattttttgctaaaaaatagaaaaaacaggatatgacgtacgaaaaaggagggttacgatgccttccttttttgttttctaaaaaattttacattttccacaatattattagtttgaccttattattaaggtaatcgataaaggaaaaaggaagtagggaagatacatgataagcggattagatttttccagcgaaactatcgcttccactgagaaaaaatatattgaacaattttataaaagcgatgatccattgctttcagatagcattagatactacagtatcttgttccttacatttttacagactcatgaggacaaaaaattcagccatcaagatcgtgctaccaagaaagtgatatttgataaagaaatgtctagctttcggacagctatgcgttatgcctttaataaaggccatcagattgcttttagtctcttgcttatgaaacaatcacaagaatttagtcaagatttttttgaatcacctaattcacacgacgactttttgtatacttacgagactatggttaccactgatgtttttaatgatactttgcgaagagatgccattgataatttaattaaatatactcgacgtaattttgaaaatgggtataacgaaattataagtttgggcactcgcttttataaaaaaggaattggcgttggatttgagcaaattcgtaaatatattgttcaacgagattataagattactggatattcaaaaatgctaagtgtgccttataatcagagctttactgtgacgcctgcttttaaagccactttttcattggaacaccaggactatgaagagtgggatctgcattgggatgaaacatatggatttaatgctgctaaaggtatgcttgctaaagcaatgattaatcgtcttaatgtaggagacgttcgctcgtatgcacagaaggatgcctcaacatataagatgattaatcaattttctagtcaggattttcaggacagtgatgtagtttacttaattaggattgattttctagtaacagatacagaaaattttccgcgtttattgcagaacagtgaatacaatgcaataaaactagcattaaagcagacaattcgcagacgattgaaggtagacaacagtcatttatttattactaattaagaaggggagagcttatgaagaaagtattgcttgcaatggatgaaggcattgcttcaaagcttgctccaatgtttgaagaaaattctcagtcactaaaggtaataccgcaatgtgtaccttactgcagaagcattatacagtcattatcgaggtttaaaccggatattttattcttgtctatgaaacgaataaaatacgataccaaggatagtcagcaagaactatttaacactatctataaaattaagactgatcctgaattttctcaggttagaattgctgttcaagctagtttgcccaagaatgatccgtttttaagagaacttgctaagttacaagtagaagatatttttattcctgatggtaatggtggaagcattaatatgctgaacgtcataaaacagttgtctaaacctgcaaacttaaagaatattgaccggtttttggcaataaaagcacctaatttacataaaaatgaaatattaggaaaagaagatcatattcaaaatgataacgaaataaaggtagaatcgcctaaaaagaagaccaaaccaatagaggagaaaaatgaggagaggtcgcctaaaaataaaagacggattaaattagagcgaacagcaaaaacaaatcaatctaagccagtcaaaataattagtaagactaagccgtctcctcaaaaaaaggtatctatcccacgtcctatcaagagtgaacatacatcaaaagtggaagtggaaaaaaattctgttccagaaaagaaaataaaaaaggtacaaaagcctcatataagtcatagtaaaaaaaatctaacccaaaaacatattattgttatttgtatcttattagctgtctgttttgttagtgcttatatttttcatttaagtcgttctgctattaacacacctccatatacctctctaattaaccacggaaaatatgtgcaggctgctacttattatccatctaaagctgtagaagtagaaaacaagatgcttaatgacagcaatgtaaaggataaagcaactaatacaagtgaaattgcagatatttcagatgcagatccaataaaatttgatgatgcttattttaatgggaactttaataaggttgttactatctacgaggattctaataatcagtacttactaaaattgagcaatgcacgtcggacaatgttagcttatagctacatgaaaactggggatgtacaagatgctaaggaagtagcaaaaccgttaaataatcaacaattaaatgacaagatcaatgcctatgagaaatttcaaaaagccaattcaattttgcaagacaaattgaagagcggacaattaaatgattctgatcgtcaaaaagctcaacatgaaattcgaaaaaataaattagcaatgaaacagctataggaaggtatgaaaatgaaaccagttcgtaaagagatactcctaaagagtgaaagcgcaaaagatacagtattaaaagcaaaaaagaaagaatataaacaaccatcagctaatactcataaaccaggacaaaaatcctcgcccaacaaaccaagaagaaaaggaaggtctggagggaaaagaagaaataatcgtcaaaaaataaataaacagcctaatgagcaaaaattctttaccaaaaagagggtaataggaactgcagcaatcgttggagcaattggtgctacaacagtttatatagcagaacaaggccaaaacactacgaagcaaaatttaagcgccacaagtaataataacgatgactcaactttaggatttgggacttcaagtaaaaccaagcgacattcttcagacaatcgtgataagaatgggactaatcctgaaaagaaaaaactcaataatctgcttaatgatactaaaggatcgaaagaaaattctcgtggaaactcgagtgatgagaatgctaaagatagatctgcttccaagattgaagatattttgaatggttcttctaaagttggcggagctatgggaaatacattaaaacaactacttaaagatgctgataaaagtactgcattggcagcagcaattggtaatccggttgatacagctaatggcttgactcaaaatgcagataagggtgttcaacaaacgttatctactcaaaataatgtagaacaggtcaagggatcagaaaagtcggcatcaacccctattagtccgtcaaatacaggtatcataccgacaccaatacagccaagtaatccggctgaaggcataacaacgccaacgcaaccaagcaatccaggtggaggtacaacaacgccaacgcaaccaagcaatccaggtggaggtacaacaacgccaatacaaccaagcaatccaggtggaggtacaacaacaccaactgaaccaagcaatccaggcggaggtacaacaacaccgactgaaccaagcaatccaggcggaggcacaacgacaccgactgaaccaagcaatccaggcggaggtacaacaacaccgactgaaccaagcaatccaggcggaggtacaacaacaccgactgaaccaagcaatccaggcggaggcacaacgacaccgactgaaccaagcaatccaggtggaggtacaacaacaccgactgaaccaagcaatccaggcggaggtacaacgacaccaacacaaccaagcagtccagacggaggtacaacaacaccaacacagcccgaacaacctgacagtagttctactccgggatcaagtgcagagccagttagttcatcaagtagcaaaccaggatcaagcgcggaaccgggtagttcatcaagtagtgaatcagggtccagcgcggaaccgggcagttcatcaagcagtgaatcaggatcaagcgcggaaccgggcagttcatcaagcagcgaaccgggatcaagtgcagagccaggtagttcatcaagcagcgaaccagggtccagcgcggaaccgggtagttcatcaagtagtgaatcagggtccagcgcggaaccgggcagttcatcaagcagtgaatcaggatcaagcgcggaaccgggcagttcatcaagcagtgaatcaggatcaagcgcggaaccgggcagttcatcaagcagcgaaccgggatcaagtgcagagccaggtagttcatcaagcagcgaaccagggtccagcgcggaaccgggtagttcatcaagtagtgaatcagggtccagcgcggaaccgggcagttcatcaagcagtgaatcaggatcaagcgcggaaccgggcagttcatcaagcagtgaatcaggatcaagcgcggaaccgggcagttcatcaagcagcgaaccgggatcaagtgcagagccaggtagttcatcaagcagcgaaccagggtccagcgcggaaccgggtagttcatcaagtagtgaatcagggtccagcgcggaaccgggcagttcatcaagcagtgaatcaggatcaagcgcggaaccgggtagttcatcaagtagtgaatcagaatcaagtgcagaaccgggtagtgatggttcatcaattactccaattatcaaagaggaagctgcccaagcaaccactggcttagggactgatgcaagtaacaatgttccgctagccgaaaatgttgagatttcttacaataaccaaggcccccaaaaagttgactcatttggtacgggatttaatgacgaaggtcaatatgtaataaaggcaaatgttgatcttcaagatggcagttcatttcctttaataaagacagtaactgtgactaaagacgctcttctgcatgatgctgatattaatactgaagtaaagcaaacgttagtatctaagccaataacaattaaaactggtgacacattaagcctgtttgatagttatcaagttacagctgctaatgatgcaaaagttacttcaaatggaaataatggaggtatagttttaaatcaaccggggaaatatcgaattactttcagagtgggatcaactgaattcattaaggatgtaactgttcaggatagtcaaaatattataaacgcatagtatataagaagggctacgataacccttctttttttcaagaaaggtgaatgaatatgtcaactgttatcttggcggaaaagcctgatcaagcacgtgcttacatgaagggactcggtattcaatttaccggaaaggccacaaaaggtgagggggaaacttttttagatgacaagacggttgtagtagctgccgcaggacatctgatagaattaagtgaaccggaacattatgataaagcatacaaggatcgaaataatattgatattttacctttagttccagaacgtttttcataccaattaaaaggggataagaagcaattatttagtcaaattaagaatgcagttaataaagcggatcgcattattgttgcaaccgataaagataatgagggtggagcaattgcctataatattttgagactatgcggtgccctaaaatataagaaaattgttagagcatatccaacagcattagataaggcagctgtaatgcgacaatttaagcatcttgaaccaataaaaaatacttggttacaggctaaagctgcaattgctcgttcaaaatcagattggttaatcggtatgaatgtaagccgtctttatacttataaattaaaagggattggaattaatggcaactatgcagtaggccgatcgatatcaactactttgaatcttatttgccagtggtataaagaaatagaaaatttcaaatcgcaacctatctacgaattaaaaggtaaaacaaaaataggagctgaggaaattttactaaaatctccaattagagttgttggtagcaacgataggaatgctaagattgaatatattgatagagtcaaaaaagcaggaattaataatagccatgttaaagggattgtaaaggcagttgatagtcaacgtaaatataagatgccaccagtcttaatgacaaagggtgacttatataaggaaatgtcgagggtagcaggatggacccaatcaagatcaaaaaagataatgcaactaaattatcaacaagggtatcaaacttatcctaggacggattctggtaagattacgaaatatatgtatgattaccttgctaaaaattttaaggattatttaaatgcaataggaataaagaatccaggtaatccatttatttttcctgaagaaaagttgaagcattatttgacaacagaggaatctgctggggctcatctagcaatcgttccaacggagaaaattatgaccgctgatagtgatgtaagcgaagaccaacgacttatgtatgaagttgtagttaggaagtcacttactttgttagtggtcccatatacctatgtttcaaacaggctaggagtacttgtaaatggtaaattgccattgatgactcaaaatacagtcatgattaattcaggatggaaaggtttactattaccgggaaaaaagaagtccaatacggctgagaaaaaaggaatcgattttagaaatatactaaaaattaatgatgtgattgatgttgtattaattaacgtagctgataaaacatgcccaccaaagcctcttaaatcaattcagatttatgataaaggcggtttaatggagaatgcctataagtatgttgaaaatgaagaatatgctaaagtgcttaaacaagttaaaggattagggacttcagcaactcgtgaccatgcaatggctagtcttgagtcgaagaagtatgtatcagttaataatcgggatataattacggttacccctaatggctggttaataaactggcttttaagtaattcgcaaataagtgatccaattcttactgctaaatgggaagaagcatatatgcgaatagctagtggtgagataagctctcaggaattgattaatacaacggctcaattggtatatgatgaatttgattccgctaataaaaactggaatgcgcaaaagcttcggaaaatttataacgaaaaggcagaaatttttaataaggaacaatcgataggaatatgtccaaagtgtgggaaaccagttatcttcgttaaagatcaaaaaaatgctggaaagtatgacgcatatcgttgttcaaataaaacttgcgattttgttatttattataatttccgtggaaaatcaatatcggcaacaaacatgagtcgaatactagatggaaaagcaacaaataaaattaaacaattagtaacaagaaatggaacgcattatgatgctaaatttaaacttgcctatgataaaaatcatgatcgctattatctagaaatattcaaagaacataaagactaaaaagcctgctcttgaaaaaatagagcagacttttttcgtagttggttctttgcctttgatataatttagctgtagtcaaacgttagtaggtagcttgtaattttcaagctgggcatatgcagcaatgctgcgataatagcttaatgttttttgattacagtgcaatttttccattaattgttgatccgttaaatcagtacgaagaacattggataagcaaaaactcatccataaattcgttggagaaagatccaatcctaatttttcttcatctccgttgatttttctgttaagtgaagtgaatgacttgatacgatggtcctcattcttaaagcgagtatcctgaaaaagatattgctttgaagaaattggaaaatttggatgtttctccaaagcagcgagtaactttgtattattaatttgaggggtaatatctgcccatgtgagagtgaggagattatcacctttatatccgcataagacagcgagaagaagctttatagtttctggtttagcgatctcaataagttcgataagatgattatgccagccaataacatagtgaaaatggcgatcaaacgatagccctttaatgttcattaaaggatagtgatcaattagtttagcctgatatagatatttaaaataagtcttcaagtatgaaatatatttgtttactgttctggttcttaaaccacgctcttctttgagatatacaacaaactgatgaatatcactattacgcacgttattagctgaacggccatcactatgttgatccgcttgaaatgagaaaaagctactaattgcgaacccaatttgtgagattgtagtatcagaaaataatgctatagttttgcaccaatgttcatagttgtcttgaaaaggatacaaacgctactcctccttttgtaataattattactctaactatataacattttgcggaggtttacataatggaaaatagttgtaattttgttggctttgtaaaacggatgtcagatttaaaagagagcaaaagcaataatcattatttgaaatttacattagataatcctgtaaggaattaccataactatattccagtagttgcttttcgatctattgctgaagaatttgataaagaaatttcagaaggagattttatcgctgtaaatacttcgttgaatatcaataactatgatgggcaaactaggtattcatttactttgagtgattttcatgttattgatgtttcttcacaggcctctaatactactgatgaggttaagagggaaaatatcaacgaggagcaaaaacaagaaaaaggagagaatgtttctacagaaaccaacaaaaataatgaacaacatcggataatttcatctgatgacttaaaacgtgcttatgaagacacaattggtaatgaaaaaaaggtggtggggcaagctaaagaagagaaaactgaaacgaaaagcatgataagttcgtcaacaactactccagcaaaccggtctactttagctggacagtctagtgatgaaactgataatggatcatctttctttggtaatagtaatggggagaatgatccaaatgatttctttaataattttgataaacaaaactaactagttttatttttgggcgaaatccaattaaacagggggaaagtaaaaatgcaatccgctaacatcgtagctgcggagtttaatgtctccgtaaagaaattgcgacgtattttaaaaaatgcattagaactagagatagtttctgacaaagtaagctcaacggatttgattaatacgatagagcaccttaataacgagaatagtatttatccaattagtgacgctatcaaagaagttttaatagatcaatataatgaattacaaaacctggtttcacttagagaagtagctcgtgaacactatgtgaaagagagggcgataatttcttttattaaaggaacgctcggaggtatgaagaaggctctagtagctggatactttcagtataatattttcttaaaaagtggggaaccagaagttaatcgtcacaatgctgataaactgatgaatgttttctttactgatctagcaggaaggtccaggcttaccaaaagctttcaaaaggttaatggtaagatgatgagctttaatttactggaagaagtgaaagatgaacactcatcaagaggacatattataggatttgctaaggatattaaccaacgaataacgccaattgtagcgtatagtaaaaagaatgtaattgtctttatgcctaagatcaataaggttaagggaaatgaatttttaagtccttcgcaaatattagatgaaaaccgaccgccaattgaattcatgatcaatttaagtgaaattcaaggaggcatttctaaaattgaaaactcagctttaaatgtattaatacacgctttaaataatcgtccattctctattaactcattaagacaaagagataatctgatatttatcattactactaattctttccgattaaatctagatgaatactatcctcaacaagacgaacttaaacaagatcaacgagtaaaaagagatttatttggagaaatttctggagctcagatggttgagtttttaaatgcacatctaaaatctcacgctagtatctcttgttctaagatgaatgatagtctcgtatctgttaaaagtcagttagaaaaagttacactttttgttgaccgtgatataaaaaaagagctaatcaatgaagccattgctaatcatgttactatctctatgatgatgaatcagtggctttcagttttaaaagttattcttaataaaaatgactatttgggagcatatcaacaagtattagaaattagcaaacagctcaacgaaaaagaagataatgaccgggaaaagcgaggtgcatagatatgaaaacaataacttatgcgcagcttcgtaccggacttatgaatatcgataatgttgcactttcagggagaagggctgatacccttatcgctacacagctgagacctattaatgctaatagtgaaagtaatcatcacaaatatctttataatgtagaagattataagagaactcgtagtcggctttcgtatataagtaataattatgctccaatagctaaaattgcaaaacgtcttggctttagtcgtactactattcgcaggattattaatacctatccaggtaaaataaagtgcgttcagccaccatttgttgcttataaaagttataacattaaggccgttaaaagatatattggtatcagagaaatagctattttgcaacatgatggtaatatctatgttccaatgctcaaggtacgtcttggtgaaaaaattggctatcttattaacagtgaaaaaaataagcgctataaaaataagcactataaatggatagttgtattcaaagatgaaaaacgaatgagtttatcgcagttctgtgaacaggatggacagtttataacaagatcatcacagcgtttggggacatttactcgtcatggtgttgccacacgtaaggaattccagtttgagagcttcttacataagaaacaaatggagaatttcattgactttttaatccagtgggttccaaagaactgctatacaatccaggtctatgatactgaaaagattaaagttaatatttcaattcgtgagtctagttttgtacttagtactaatgtggttccttataacgaaatttcagcttttatccgtgtctttaacaggctttttaaagcgcatgaatgcatggcctccatgcagattatacctaatgacaataaagtaaaagactataaaattacctttcggaataagcaaaagatgatatatctaactctgaattctaaggcacacgaattttataagaaagaggctatgcttcacggagaaacattgaacaactatattgctaagtttctcgaggaagaatttaaaaatggaaagagagaccatatctaaaatatggtaaaatataattgtaaatattatttacaattatatttctgacttttgttaagttacgtttcgttttttaatgcttgttgcattgctacttttgtttttttgaagcatatctaaaatttaaataaattaactaaggacttactagttaaagctaggggtccttttttctttttggagggatgcaaagaagttatttgctttttatttgtcatgaaattaggtagaaaggaagttatttatatggataaggaattagtacaagctactcaagaacttgttgattatgcttggaatcaagatctatcaggaatcaatgttgggttatatttaaatgagcaacatgagtactgcatttatactgattcagatgcagctcaaaatggtttaaatactgcggatgctttaataattattaaaggaggtattgctcaggtagatttggtgcaattcactttgatacagctatgtcaaaaactacaaagaaaccaactagcttatttgtataatactttgattagcaacaaagtaatcatgccaggtacaccagctaatgctatcaaagttactccaccagttgaggccttcatagctgcactatttccacaagtattagatgatttttataatcaggttgtaaaacatgctcaattaaaaaaggtatgcgaaactattaataaagatttagttcatgaataggagtaataaattatgggagtagataataaaagaacgttaaataaatgggttgtacgattggcttatgtaatgcagttagataggcaaagtagactgatgactaaagcattattcgatgaaaaccatttagacgtcgatctcgatctcactagcattaacgtttcttttgataataaggttaagctcgctatttacgagtggtttaatggcttgccagaagatttgcttgaagtacatggtataaaaagaacttcagctgactttgaacgtctttatcaatttccattagaaaaataccttcttatggatgaagaacagctaagtcattatagatggtaaattttctaaagcttattagaagagtccttcctcgggagggcttttttatttttaaacggaattctaatttgctagtcattatcaatattttgaaaattttagtaatcctctttttacagatatttcagtcatactaaaaatgaaaaaatttaggaggaaaactatggattcacttgtaccaaaatatactaaccaaactttgagaattagcaatgatcttatgaagataagtgaacttttaccagtcgagtgtggtcacgaaccagtaaccctgattgaaggaatttattgtatttgtgactccatcaattacggggatgttgatgatagttctagtgaccaatatatgcaattaattgatgatgtggccattaatcttaaaggattaccgctttattaccatatacagttattacgtcagtttaccaataattattttgaaaatatattaaagattcaaccgaagcgaagaaatcttcgtatcgttgaacgagttactaccgatatgattaatgaaagtaaacaagtactacagaatacgaagaaatgtttgtcaccatttgaattgttatatctatatgctgattcaattattgacaataaaataacggctagtccacatcaatatgatgatttcatggagattaaagatcatattgcaacacaaaaagatgtagttcttactttccttgataaatatgaaaagttgtatggagatgcgttaaaaaaagaggcacaaaagtatgctaaagcataggcctctaaagattatagtaatttgttgtctactgttatttatcacggtgttatcagggtgtgctcatcaggatgtattaacaaaaaaggagcttaacaatagctttaatcagagtacagactatcttctggaaacgcgaggaatggttgccaaacagttaaaagatcctacagtgaaaaaagtaacagtaaccactaatcaaaaaaagtatattgagcattatcagcaacaagttcgtaagcaacaagagataattagaaattcaaggtatttaagtaactatccaagaagtgtgtatcagtacaataaacaagttgtggcctacttaatagctgttaaaaatgaacaaagtcctcaaaacattaatagaaattttcatagtgtcactaagataggtacctttattgttgttaattacctaagttcaaggcctacaaataattaccgattagtaatggctattgatgactattcacgtacaaatattgatcaccaacgttccactgctaaacagaaaaaaactacacaatatcaacagcgattgttagttcaagcaaatattatgcttggaatttttgctgtaattttgattattttgatctatatccaaccaagtcatcaaacagacacacttgaagcactaacagatgtgcgcaactcaagatccttatttgatcgtcctaagccacaaggagcgaaccttgctgtaaattggtcaacgaaagtctttctgataattattgttgttttaattttagtaactaattatatgctggggaggtaacaatggattacttaagaacagtatttaatcaacttagaaaagtacagtgggcccgcataaaagtggctgcgcttgatactgttttgtgcatcatagcaatattaatgattgcagctattttttatgggatagatatgggtgtaaatgagtttgcgcaaaaaagaatgtaggaaatggggactagataatgaaagaaaatctagatgttcatagtgagcattacttctacaaaaaaatccttagaaaaattaatcagaaaagtgagcattaccggcatctttctgatcggcaattacaggcaagaacaaaactctttaagaagatgctgaataatgggaagcagcttaaagatatcttggttgaagcatttgcgactgttcgtgaagcggatcggagagtattaaaaatgtatccgtttgatgaacaagtcctgggtgcattagttcttaatgcaggtaatttggctgagatgaaaacaggagagggaaaaactctaacggaaactatgccggtatatttaaatgcgttgaccggtaaaggggttcatgtagttactgttaataattacttagcacagcgtgatgctaatcaaatgggacaggtattcaagtggctggggctttcagttggttataactcaggtgacttaaattttgataagaagaaagaagcttacgcagctgatataacgtatagcactaacagtgaattggcttttgactacttacgagataatatggcgttgacaaatagccaacaattacaacgaggattgaattacgccattattgatgaaatagactcaattctcattgatgaagctcgaacacctttaattatttctggagaaagtgaatcatatccagaaatttacttgagtgctgatagatttgctaagggactaacagaaaaagattatcaaatagataaagaaacaaaaactgtatctttaacacacaaaggagtagaaaaagcaaatcattactttggcattaataatctttttagtccagataatttggtacttactcactatgtgaataatgccatgaaggcaaattatactatgaagaaagacatggattatgtagttaaggataatcagcttcttctagtcgatcaatatactggtcgcattatggttgggcgaagatttgctgatggcttgcatcaagctatagaagctaaagaaaacatggaaattcatgaaatagctcatactgatgcaagtattacttatcagaatttctttcggctatatagcaaattagcagggatgactggaacagcatatgaagaaaagcaagaattctatgacacctatcatatgcgagtggttcaaattccaacccataagcctaacaaacgaaaggatcttccattaactctatatcctacattacagactaaggatttagctattctaaagttagttcagaaactaaatacaaaaggacaaccagttctaataggcactgcgtctgttgaggcttcagaacgaatacataagttactaacccaaaactggattagtcataatgtcttaaacgctaaggataatgagaaagaggcattaataatcagtaaagctggccaaaaaggtgcagttactgtggctacaaatatggctggtcgtggtacagatattaaattaggccctggtgtacgggatttaggtggactatacgtagttggtactgaattacacgagtctagtagaattgacaatcaactaagaggacgtgccggtcgacaaggtgatcctggcatttcaaaattctttgcttctttagaagatgatttaattcagcgttatggttcagaacgattaaaaaagattgtaactgtgcaaaatattaaaggttcgggtaagagaaagaaagcggataagcaattgaatagttggttatgtttgcatttagttaaaactacacaaaaaaaggtagaaggaactaactttgagcaacgacgaaatgttcttcgatttgatgatgtattgcgattagaacgtaattctgtgtatggtcagagacaacagattttaactaaccaaattgatcttactaaaacaatagaggggatgctaggacgaactattgaacgtaaagttaatcaatatgctcaaggaaaacgtaattggaaacaaaaagaattaattaatttcattaatggagagcttaacttggattttccagagaataaaacctcaaagcccaaagaaattaagcctttgaagatgtatcttaatagattatgtgtaaccaagctaaactcaatttacaagcaattaattcagacgaagcaaataaatgagtttcaacgggtgatattactaaaatctattgatcaggcttggaaagagaatatggatatgatggaacaattgcgcttgtcagtttctttacgtggttatggacagcataatccattagtcgagtatcagaatattgctcattatcaatataaaaaaatggtggcccaattagaggaaagggtcactaagaatgttttaaatgcagaaattagacaggcaggtgagacccaatgaaaagaagctcgtacaaatatcgtggcttgggtaatatgattagccgttttgcttatactatcttaattctggttatatatcatttattgtgtctcctaactcttcctggtgtgaatatgcaatcttttcagttggcaagtattatacccgcgattaatttgttaagtcttttttctggtggtaacttcgatcgcttatcaattctttctgtgggtttaactgcatttgttaatgcgcaaatagtggtacaaattttacaatcaggtatttcaagtacactaactgaatgggcaaaaggtggtcaacgcggtcatcataaattaaaccagttaactaaaatattgacgtttatttttagcattatacaggcaacagctgtcctatttggggtaaacaatttagcaaatggcgaatttttacttagtgagaacgtatttgtctatataggtctatgcttattactagcggcaggatcttttattactatatggcttgcagatcaaattaccctatatgggcttggaaatggagtttccgtcatcatttcagctaatattattgcccaatatctaacacaaggattaacaagctatccgtatctgaagttggtaatcattattgctgtggttgttttgatgaccttctttatagtctttattaataattcagagcgccaactaaatgtcttttatgcgaaacgggatttttatggtgatcaacagtcatatatgccagttaaacttttaacttctggagtaatgccagtagtatttgctagtggtgtcatgattattccacaaataattttactattctgttcaggacaagaattaaatactttctaccgattaattttgtatcttttttcttggtcttcaccatatggaattgctatgtattcttgcctaatcattggatttagttttctatattcagagattcaacttaacccacatatgttagcagagaaccttcaaaaacaggaagcctttattgagggaatttatccgggaaatgatacagaaaaatacattattaaacttcttaatcgaatgtcatttatttcttgtgtcattctattgatgataactgttttaccaatggttataggtaattattggttacatatacagtttttaggatcgataggatcaagtttgattatcatcgtaagcgttcttgtagagatttttaagcaagctcgtggccttattcagcgtaatgattatccatcatttcttgatgatcatgttgattttacagaataggttaattaagaggagatactgggatgagatttaaggaagcattagtgaagatactattgatgatagttattattttttcgctttttggtatcaaaatggtttacgaatttgcttattcaccatttcaggtagctatgaggagccaagataatctagtggttttctatcggccaaggtgttctcgatgccatcatgttgcactaagagtgctcagcaagaattatttttcgataaaacgtacttattatataaatgctaacagattggataacgaagaattaaagcaagcgaatctgacgattacaccaggttttagataccatggaaaaacaatacagacagtgaagggggatgaaattgatagaattattaatgattcaaagtaagaagtacaaagttactttaactataatgaaaaacaagacaatataaagaaaacaacatataaggttcagttcataactgattagatttataataaatattgtaaatcggacaaaaataaattaattttcaattaattcaaaaaaaccatatttttttcgttttggcatatttggatttgctacactaaagatgatcaagaaaggggaaaagataatcttcaatcttgtgtacttagtttgttaattaatttataaatttagggaggaaacctatcatggaaaagactatgaaaaagaaagctttagttgcaactactgctgtagccggtattactttagtaggagaggttactactgttcatgccgctgacaatgtacaacaaccggtaaacgaacaaaatgttaatcaatcaagccaagaagaaaagcaagctgctcaaaatcttcaaaatgcacaatctgatgttaatactgctacagaagctaattcaaatgcacaagacaatttggcctcagctaataataacttaagtaatgcaaaaaaggcagttagtgatcaagcagctaaagttgctgacgcaactaaagctcaaagtgatgcaagtaccaaagtagataacgataataaggttgttgctgatgctcagcaaaaggcggatcaagcaactcctgctaatattgaaaatgctaagcaagctattgaaggtcaaaataaggttattgaccaagataatgaaaacattaagtatagtaatactgaccaggataaagctcaaaataccttaaataatgcacaatcaaatgaagataaggccaatgcaacattatcaaataagaagagtagtcaagcaagtgcccaaaacaatgttaaacaggctgaagacgcgttaaatggtactcatcttgtagaagcccaaaatgcttttaaccaagctcaaagtaatgttgagaatgcacaaagtaaatatgatcaggctaacaatcaattgagcgatgcacaaaagaaagttactacaaatcaaaatgacctgactgctaagaataaggctttagataacatcaataatcaagtagatacagatcaaaacaatgttaacagtaaccaagcaactgccgatagtgcttcttctgcaacacaagttgctcaaaatgctgttgatcaaaccaagcaaagtctagataaggttattgaggaattaaatggtttttctgaaaacacaattaaagtacctgcaggtgcccaagaggcttacgaagcatttattgatgcagttgataacaatgccgatcagtctcaattagatagccttgctaagaagatgtatgatactcttcaccaaggtcaaggtacgaatgggatcaatcattttaatagtagtaagtatgatcaaaatcaattggttgatgtcgatcatcttacaacagatcaattaaatgaactaactcaatttgcagctgatatgatcaattcagcacgtaaggcatggggaagcgacaaaaatgctgggactcttattccaacacaaggtgtttcagaaatggctcaacaaatcgctaaaggttacgttagtgataattggcatattagtcaaggtcatgatgttaaacgtgttactgcagctgcaggactaatcgggctaaacgatgcaggtcaattctatgaagatgcaagtgaaggatatgttcatgcatggccatgggaaaaagatagttataccatggataatttaaaggaagcagtatatgattctattcttggaatgctatttgcagatgataatagtggtaatggccatatgactgatttgcttgggttacatgtaaatagaaaagaagatcaccaatacttcggtttaagtacaaatatgtgtccaggttcttacatgggtcaactacactttatcattgttgaaaatgatccggcatatattaaagatccccaaacctttaatgctaaaggaggaacaaccaagattgaatacattgacccgaaagttcaattaaatcaacaaaaagatatactaactactactttgagtactcaacaggctgatttggcaactaagcaagacgctttaaataaagcaaatcaaaatcttgcaaatgcgaaaaagcagttgagcgaagaccaggatcttcaaactgtagctcaacaaaaccgtgactcagctcaaaaagcattaaatgatgcaactgccaaggtaagtaatttacaagcaactgttaatagtttgagtcaagatctaaatagtgctaaagcaactcttgaccaagcaaagaagacgcttgagtcttacaccgctgatcacaaggctaagctagacaattacaacaacgccaaagctgcacttgatgatgctaataaagctgtagctgaagcacaaagcgctgttgatactgctgttaatgaaactaaaattgctcaaaataatttagaccaaaagaaacaagctgttactgatgctcaaaataaattagctaatgatcaagagtatcttgccactttgaagcagaatcttgctgatttacaaaatgcgcctcaaaacttacaaaaggctaaggaccagttagcaaaagatcaaattgcactagataatgctaataaagaccttcaaaaccagaaggatagtctagatgagcttaataagaaacttgaagatgctcaagtaaaggttaatgaggcgcaatctgcagctaacgtcactaaagcaactcttgaccaagcacaagctaagcttagtgatgctgaagcaacctggaaggagttacacaatgatgctcatcgttatgggaatgtcgttaaagtaactccaatcacaatggaagctggtactagtcttcctgatccagttattgaaaatggttttaccgttaatactggcactaatcaactatttgtctcattagctgctattgattcatctaataataatattccacaagggacaaaagcttcatgggctaaccgttctaaagcattgacagattcacagaatgctggtagctactctgaagacattttaattactttcccagataactctactgtaacagtaccagttgacttaactgttactgctaagaagattacagaagatcaaaaagcaacagaaggcggttatcatattgttaatggatctgttgtagataagcagaataacttggttagtggttggactgttaagaatggtcaaatggttgatcctgaaggtaacgttatcaaaacaacaatgtctacagcccaaggtgttactattgaaaaaaataatagcaagtccgggaatacaaagacaaacatgattcaaacttctttaactattgctaacaacaaggcaacaacaaacaaagacaaccagttaccacaaactggcaattacaacaacaatacaaaggtattaggattagctggtattgcacttgcatctgctttaactatgtttggatacaagaagcgccaacataactaattttcttacttgatgggtttctaaataaaaaatggactacttcagctcaaggtagcccatttttattattatagtgaagcagttattcttacgtataaccagactaaaatataataaaaatctattatatattaatcaacatctcggtttaatcgttaaaactcctctgagagctaattgttaatattgagttgtatagtaaatttcggtaaaataaaaaaatgaaatactttccccgaagtatttcaccccgtatcacactaaaatctccaccagactttttagtgaaaaatgtttctttaacctatagacattcttagtatattatgaatgtcttttttattatgttctttacgaacgtatgtacgcacaatgtgctcgttatacgaacgagcgttcgataaaatgtaagatataccgtgttttagatgaagactctggtgcttatattagtaacgtggccggatgtatgcaatcataaaaggaatcgcaggtaatcctgatacattctggatgaatattaaggattatattgagttttttaatccggatcaaattaaagaaatggagtaggctggaaaatatatcaagcaatctgatcgtaggaaagtgaatatagatcagacatcaggtattaacaggcaacttagtaatttctacgagtattatatgggatagagccaatggtgacagaataaacattaaataatgaaaatcaactaatacattaatatggacaataacagtattagtgataattgtgtttagcaactgttttaaatgtgggtgcaatcattaacataattgcaagtctgatcgtgacgaaagaaataatgagagtatttaacaagggggcaaaaaaattatattctggggctacgtcggggtaggtgcctgtttagcatcagtccttataaatatgatttcactagctttctaaattttgcattataaaactgaacttttataaaatgggagagagtccccaccaaaactacggttggtctttttgtattgtctaattgattttataataacagtaaatattccttactcaccgtatgaggatgccagattactatgttatgattagctgattatagttgaatattggcgtaaaatgtaacaatgatgatattatatcttccaatttgaaaggagtaataggcatggtacaagttgacgattcaaaatggacatatctactgcaaagattacacgaacaaagtcataagcagcgtgaaagctttgtgattaacttcatactcatgaatttattatcagacggatatacagatgttaatccagttttacaacaacctataaagcaagatcattcaagtgggaagcgcgaagcaattgacctttatttcccacaaatcaacttgggcattgaaattgatgaggaccaacattttaacgatgagaaccgtatagaagataagaaacgaacgcgcagaattaaagataaattgaacccagttgatattggtagttcttcatacactgaaaagagaataaatgtgcaaaagagcagaagtttgaatgatgtaattactgaatcccgacaagtagttcaattggttgaatttatgatcaacaatgcacgtcgaaacgataattatgagccgtggcttaccatggaagagaggcaagaaaaattcaataagcgtcctgtttatcgtccaggtatgaatattatgtggcgcactcataagctggcaacaaaatcctttgtaaatgctggttggaaatttgcgcttggtcagagtggtttagcaaatatctatagtgacgaaacaaaaactcaaaaaatagcgtcattttggtttccaatcatcaagactaaagaggaagcgattaaggataagagttcttggtttaatgaaattaaagcagaccgccgtgagatcattgaatattatattggcgacaaagtagatatatatgaaccggatttattgccccgaattacttttaagaagggatatgattactatactaattaccacggtaatcagtatttaggcgtctataagtatgatccttcaaagtccacactaaaggaaagacattatgtgctggaaaaagataagtcggtaattaacctaatagaagcaatcaaagaagaaaaaaagagagctacaaagaagaaacaaaagaacaaatagttcatttgagcttcttaaatacaaggccccttctgctattggtactagcaaaagaggtcttgtatttatataaaaaggctccgtatccatgtgtgatgtgggacccaatgccattcgtatcccgtacagggaaggattaatgaaactcatcgagatctaaatcctgctataaagccattaatacctcaacaaaatcgtcatacttgaagttggggaagggggagttgtacaacacaattgtgatattatatttttcacttagatcagtgatagaagcccaaagattgagctttccgtttgagtgcggctagaagtcagcaataatatcatcgacgcgtttaattgctagtctaacattacaagtttgatttttcataaccaatccttatttaacaaagaaacacttatgatacaataagaaaacaagcaagttttaagggcgttggccgattcctacgagctttaccattctgataggaagaaatttgtttaaaaaagaggggggagaccatgaataaacaaactgtcactaatctatcaaagttgcccaatatatggacaaagcatacaataaaaccgaaagctttttcagaatttgatttgcattctgacaatcgcggtttcttaaatccaaaatttgaaggcatagattcgggaactttaggaacagcaatcgatcttggcgcaagatatctcattcttaatgacgattgtgcatttgataatgcaaaaattggagcttttaattacgatttaaactccaatattaatcaagcatatttaaagcaatggtatattgagattggtgatacaaaaacggctaatgaactcagcaaacctcttgacaatgcggcttttcactttaatttaaacaaaagcgtgttagaaaacgctagaaaaatacctctaaaaaatctcgagaggttccagtgtgaacctttaattacaatggcgttctttgagtcatgttttagatctagacaagctcttgattatgatattccttttagattagatagaatgtcttttagccgcattagaactatgcttcaacgatgtgctaatttttttaggaaatatggagcgccaacacatacagactatactgttacagcaaataatgtttttggtgatggtgattatttaagcgaaaactatgtagcagatttcaaaacatataagagatcaccactcgataagccttataataggcgtcagattctattatattatgctatcggtaaatacgaacaaaaataccccgaatttcaaactatacgtcaacttattttctttaatccgagaactgataaagtttatagcataaatgtcgatgatatttctccagatctaattaattattatatagaaatcgccaacaatcccatcttagacgaaatgaaaaatcaacaaacatatagttaatcatttacttctctctgagagcttatttttaatgttgagttgcaagaaaaacttcggtaaagtaaagaagtagatatttctccacaaatatctcaccccaatattcatatactaaagttttctccaaaaaaatttagtataaatatgtttttttatagtctttagccatcctaagcattttagaatggcttttctattatcttctttacgaacatatgtacgcatgatatacttataatacaaacgagcgttcgatcaaattgttaaaggatgattgtaatgagtaataagatataccgtgttttggatgaagagtcaggtacttatatcagtaaagtggccggattcatacgatcagaaaaatatacaaaagttgattcagcctatgtctataataaagagcaagcaacgaagatagttaaattaatgaattatatgcgtacccatatgttgaaagaagggaatttaccttcgggtttagaggaaagtcttcgaaatcagactcttgccattattgaggtagaactaaaagacgtaaaactatctttagaagagattgccaaggctcttgaatcagcaaaagcaaagaaaatacccaaagaacaagcttttaggaatgctcaatgggaaagaattcgtcggtatcacgactattttgattatgatattagtacgccaagtcatcaatatatctatatgcgtaattgcttttaggagatgtttctaaatgaaaggaccaattctaaatcctactaaaaaattattacgaagagccaatagaaaaatagaggagatatacaatccacgaaagaaacaagctttattcgtgtttaccactaaccttgacggctatcatcttacctataaaatgagtttagatacttttgccgccttaggaacggcaatctctcctgttatgataagtgaaattcctgctaaagatatagatagcaaagaatatattttatttctcttttctatttataataaatggaacaagttacccatggtttttagagggtatactccagaccaggttaaatggtttatgaagaaattcggaaatagaatatataatgagaaatctacagttgactggtggcgtaatacttattaaataatactatgaccaagaatattgaatagggtataatataactagttgctattaaaagtaacgatttatcttcattggagctccaggacatcttcccagtcctggacttctttttataaaacattcattttacaaaaggtctggctaaactatgttataatagtgacatactatttaactccctaattttaaatagtatatttccattattaaataacccaggaatcattttggttcctgggtccctttttatctatatgatataatactagagcaggcaagttttaaggaaggtggccgattcctgactggaggtggttcatatggacttcaccattatgaaaggattatcggcacatgagcgcttaccaagcacttatgttaatgttagcatttgcgacatttattatcgcattgctgacttttattttcacattctgtgcataataaaagaccgtcctcatataactttggcgagttgcaggacgatcttttattagttaatctgtaacatggccaccgtctttttaacgggcctgctttttgtgtatctatattatagcatgaaagaggggaattgagtagttggtaaagatgacactaactattatctttctttttgattccattaatttctaaatgaacaataaaggctagtcctagacacaaaataaaagctaaaatagccaacaaaaagggtataattgatcgttgatggaatggaaaaaagttaaatagcataaaagatttgccatagagtgtgttgaatgtaaaacttttgttagctggtatattattaattaaaagtccagaagcaatccatgaccacatataaataaattggaatacacttgacttgactaatttccagcaattttcctgatctctactattgagccagaaatgccaatcatgtataaaatcaaatatgttctttaaagcagcaagtcccataacaaatgaaaatacggcaagtgcagctttgtgattactcccattcattgcaagtaaacctaaataataaaatccatatgtgaataaccattcgttaatagaatacaacgtaaccaagctaaatattattgttaataatataattaaaatggtacataatgtatttttattgcttttcaaatcttaatctccttaattgacactgaaagcagaaccatactaattacttcagttcatctttttttgtttggtttgatagaaaatcatcttaggatgatccatccatgatagtaaacgctttacttgactgacttatccaagaagaatcttgagtggggaagttagaaagcctcattttaaccagtcattaaaattcttgttttaatgccactataaacagtgacgccctcttatcatgcgtcttcatcgtcgtcagcaaaaagatttttccttttggaaaatctacatttctaaaaggaaaaactagtgcccattgactccaaaataaactaggcctctcatcatttataagcgactctgagactctgagtatatgaaattgatttagctcggacgttatcttttatttttctttcaaattgtataagtagtgttaaggggattaattcttctgttggtaaattttttgactatttgataattcatgctaaatctagcacatatatcaataagataacgactattgcaactgccagtcctatcgttaattgcaaaatattactcatgctagggatgttgaactacgcccttgttaactgcaaaattattaagaatttcattttcgcttcgcttcatattttggttgtcataatagcaaagactgattgttttatcctttttaaataatgtatcgtagatcgttggatatagcagtttagttttttgactattatagtcacttcgatatcgttggttaccgtgaccatcaacaggaaggcgcatgatatggtgaccataccatttatctttttcattatttggtgatcgctgattcaaaacggttaatgatgtcttttttataagaggaatctgaaacgcattgacgttatatccttgaggtaattgatggcttaggctctggtacaaggtctcaaaaagtgttcctaagttattcttgtcgaatttaatcccaaagaattctctgatatctttggttgaaccatgtaagcgatagttatcaactgtaactagtaactgtggagtcatcgtaccgcctttgataaacattaaatgggctatttcatattgcccatgcttctcatccttatcaaaacgaatgatgatcataatgtagcgctggttcttataggttacaaagcatgggtaaaccattgcctctgcttgtttcatttcttttaccacggttcgtaatatttgaaaatattccactgattgcagtttatttttagtcataacgattgtttcctcctacttaattagttacactttctccaccactacctgctcggtttaggagttgttttactgcttttgctccctggcattttacccaatgtaggcaattaactgcatttgaagttcttgttttccatttcatttactgcagcccaaaccacttacttgatttggtaataatgagcttttttagcattctcctcacttccactcgagtaatcagataaatagtattttaccttgtctaaatcgtagccaagatgaactacaccccgactaaagtcacgggatttctggctaatttatatcagtaaatttctaaaagaactgtgtaacccgtgccacaattgattgagtcttttgtgttggtaagtgaccaataacttcaccgtttgatcttgcgttaatgttcacagctcgtaagtgttgcaaaaggatcgtgccttgcacgttagctaaattaactgattcgaaaaagggtgaattagcatatttgggatcgttgtgatatttagctgaactactaattggaagtacaacagccgtattaaaaaagtgattgtagttttgattgctgataaccacacagggtctcgttttctttatctcagaccctttagccggattcaaattaatccataaaatgtcaccttgcttaatggtcattagtcaaactcctcactttcaatatcagctccccaattaggttcagctgtatcaaagctaccatactttttttcttgggcataagctgtttgccacatattcgaaactggctcagccttaactatgtgtactaacccattagcatcaattagatatctgatcttgtcacctggctctaaagataacgtttctcgcacttgttttggtacagtagtttgattcttagtagttatagtagatactgattcgcgttccataaccgtctccctccttacttttccttacatatatattataacttcatgccacctattaaagcaagtaattgtaagaaaactagttgttgctgatggctaagtaatcattgttcccacttattcccattaatccagttttttgaattttctgccatgaaggcatccccctgcagttagattatggcgattttctactgctccacttcctgatgacgaagcatacaatgagatgaaaaataaaggctttctcaggagaaaggacgtgaatgcgacaaaaattctctaatctttggtaaggcttaattagtattttattgttgatttattgttgaaatcaataaccacatctttaacaattgccgccactacgctattatttaatactttttatttttgatatatcgttgattattaatgaaaagagaagagaaaatttacctccgtatgattagttactgtaaaggaattgaatcgctattgccaatcaagaagtctttcgcatcaccaatataattatatttctttttggctaagctatttattaaatcgttccaattgataaactcatgacgatatcggtcatcaatattatcattaattgtcgcccaggtttgtataaatcttggtgaaaaaatatcataaggcaaataatcatatatacctttattggtatctaacaaaatactacgtaatattctgcctgggttatcccgtccatcgctcctaggttctctcatatcttctaccagattagcatcttcagatacccctaaaagatatgttattaatccgcacattcttaataacgttagagatatgttttttgaaagatttaatatcgtatattttgaaacctttactgagggtaatacgggtgcttgtgcctttttttcagaaagtaacggaccaattttgtcaggaaaaagtaaataaaataaactttgaaattcttttttggttagtagcattttcaaggctctacgaccattatcaagtagtctaaatgcatcattttctatcccatatagctcatttgttccttctgctttacttgtaccagcatcgattaatattacttttatactatttaaatctaacgtaccagccggtgatagaagaatatcctttttagttccttcaaagtgaaccatcacatttttgggattcatatcaccatgagtcgtatttgcctgtaaataatttgtaaaggaaacaaccattgctgctattgtattgattccatattgaacaatgtttttcttcgtttcaaatctatttgagttttcttcatatagttctgcaagctctgttgtccaatcactaaaaagcttgccttccccaagctccataattgtatagagaaatttatgattattaatcataaagtttccagcatcgtaaactcttgcgctatattctctaagcaaattcagagcattctttcttgattccaacaaatccttatcataactatcagaatctaaatatatctttagaatctgtatctgctccaatagtttttgtttaacgccgtttgtaaaattaagttagaaaaatagaaaagccatttgtggtagacttttgaatacccctaaacaaaagaaaggaaaccacaaatgacttacacccatcttaccacaaacgagctgacaatcatcgcccattctttcgtgcaaaagcttaaagcgtaccgagtggcccaaatgatcaaccgtagcgccgaaaccgtttatcgcgtttatcgttacctggaaaccggtgcctcaattgctgattatcaagatcactatatgcgcaataagcaacgttgtggccgaaaacgtactcagttgtcactggctgaactcacttatatcaacgacaaaattgcccaggggtggacgcctgataccattattgggcgcgctgagcgcccaattagttgtaaccagcgaactctttaccggatgtttgaacgggggcagttcggtttggatgtccgtgctttgcccatgcgaggtaagcggcacccgaatggctatattgagcgccgcgggaaggctggccaattggggcgaagtattcacgagcgtgccaaggactttccgcactatgccactgaatttggacaccttgaagctgataccgtccaaggcaaaaagcaccaaggagcggtaatgaccctgaccgaacgccaatcgaaggtcgaaattgtactcaatgtgcacgaaaagacggctgatgcgattaaccaacacttaggtcagtggcttcgtaaattcccgcggcacttcttcaaatcgattacctttgacaacggaaaagaattcgccggctggcgcgagattgccaatcaatttgaccttcacacttactttgccgaggttggtgctcccaatcaacgagggctgaacgaaaacaacaacggtcttttacgccgggacggcttaacaaaacggctaaatttccgcaatcttcccgatgaattggtgacccaactgatgagtaagcgaaataacctgccccgcaaatcactaggctatcgaactccatatgaggtattcatgtcctacgtcactgatgagcaactactttctttctaacttaaattgacatttcgggtaactagaaaagttacaccatttttgccactgcctaaattttttattaccttaagtttgttttttaatcgtgaattaatttctttaatctcacgttttttatataaaattttattactatccaaatctacagagatcttggctttatcaagcttcatcttgcttctccttcatatatcatagatttcactttcatcattggcgattatttcttgtacccttattaccataggattgttttgcttctgatgcaaatcagctattcattgaaactggtaagttatgccattttcatctgaaatttctattctcgcagttttattaaaaaagcactaactcttatcatgaagtgccctagaattgttagacacaaatctatcgattctggagtattttttatgactaaatattcaactaaatttaaggttcaaatagttaaggcatatctagatggagaaggcggattttcttatttggctaagaaatttggcttgtccagttcatataatctaaggaagtgggttgatcttgtaaaagagcaaggatttcaagcgttacaattgtgattgtaactggtattattgcattcactgtttgctatacgcatccgcgtaaataaggtaaacaaaaaaacaccatcctacaagtttagccgactttagatggtgcttagtttctacgtcgtttagagattaagcattgtcaacagtgcttataatctcagaagagtcatgtggcagtatggctctttttgcttatatacgtataatagcttttgaaaaatttattttcaactaaaagtatacactcaatcacatggctgacatataattcatatttgaaactgtagtattcatgctttggatcgtaaccaaattatccgatttaccattatcatcgtgactttcttttagaatctggcatacagcctcccctaagttaccgtccatgatcatatcagtccgaaggtttaataattcttcgtcacgactaaataacaaaatggaaccaggttgtcataatgtttattcccatatttaagtaatagggctagcattaccagttagattactataccccaaaattggcggatcaccagtttattcaaagtatgtcacgaaaggaaaatatgctttaagaccgagttactagtagaatttctgccctgaaagacatcgcagaattaactgaactttcttaagactatgttcaatactttaatcatgtcagaacaacattaaaaacaaaaggcatgactccagtcgaataccgaaatcatgccttatagcagcttaatatttcaattatgtttaactttttcttgcacttcaaagttcttttctttacaaaatgctattttgcaagttgctaaaatttatagagatactaatatctcagttatttaataacaagattaccaactataaccttgtattgtgtttttcctaaatcagcttgacgtgtgtcgctctttttaatatttttaccaactgactcagcttcattaataatatctggattaaagaactcagcatagtctttgatattgagccaaaagacatctggattattagctatctcctttactattgggaatagatcattatctttatcaatagtttgaatgtatttggctatatctgttagctttttagggtcaatcccttgctcttggagtttctgtatagcaacagtttgatttcggttggcactttcaagtaatcgctgtgccgcaatctttgaagtcgagtttatcaatgcaccagcatttttagcgaagaatttgtgctgcttattatagagttgaactcgctgcgcaacaaccttttttgcgccctgttcagcagcgtgaacggctaataaggccttgtctttagacaaacgagaggaattacataagtcgtgagcgatctcattatttacggccctttcagcttcaacgacccctattttcttttgggcattgggatcaataaggattcgttctttaccgagataagcgtcatttacatcatgaaactctacctcaacgactaaaacagaaggctcattaccctccgctgagaaactgtaattagaaattaaaggattaggaaacggcttaagctgattgattttgtagttgtacatccgcttatttgctatttgataagcttgagaatgcttttcagaagaaaaatcagtatagtttagaaactgattatctgtcctatcaagcattgttttaactgcattcttcttcttagcagtaatatcctttagatagtcctcatactgaggtaatacgacattatcgaattcagtatcgtttaagaccccttccatcttgttaccaagtcgcttcatcatctttaactgtgagttgatagactggtaaatagggaatgtatagatgtatatctgatccctcttggatccttcaggaagaggccggtcaatacgcccaattcgctgttccaaagtcatagggttataaggcaagtcgatattcattaaagtaacggcatcttgcaggttttgccctgtcgaaatggtgtcggtacctattaccaagtcgataacggtattgtctttgatgagctcaggacgcttctttgatattggggagaaatgctctaggacatctttcttcgttgatgaattcttatttaacatagctgctgctttgccatcactgatgttagcagcacccgttatcatccccatcggcaacgtaatcttagaagagttgtaatgggaatagatcttatcatagtagtattcgaccgtatcggcgaattgggataccaagataatcttatggctaagtgaacgctccttatcaatgcactcaatgatcttatctaccttctcatcaatattactataggattccttgaggttggagattaattgcttgagagtaacaaggtccttattacagtcggtaatcatcttattgacagcattttgcgctttgcggttggttacactacttatctgtgcttcaagcttttgcaggtaccgtttctttcggataagggatttaacagattggtctgattcattattatctgtgttaacctcgtcctgataaaagtctttgaacaagccaagatcatttctactttcgtactctgtggtatggtatgcaagcctcaggaactctttgtagcgatttagtagttccttgcctttaaggtaggacatcgggtccaaatagatgttcttgagcttctcgagtttgtctacaatatgctgcaaagagtcagcgaatgctttccaacttgagtcggcacgcttcagaagcatcattttcaactgtttagaacccagctcctccttactatcgtcaacatacttaataggatcctggtatgggaatttgaggtccgcgattgtatcgaagttattgctgaagatctcatttttccgcggctcataaggaatatcgacacttgggaagttacgatgtgggaacttggccccctgccctccataggtcttacgagttctttgcagatatatgtcgtcccagaactccttgaaggcttgatcgtccacagctaaacgcttaactaccttattagtaacactattaggagacagcaggaaatattgcttatacttcctgtcattagcaatagcgtccacattcaggaacagtgaacctatattgataacgtcctcacgctggttattccagggggtcgcagttagcattaacccctttaagcgaggattaactttcttcatgtacgaaaccttgcgataagcttctgtgttgttatttttgaagcctaggtgggcctcgtcaattactaataaggtaaacttactgttcgtcaactgagagttagggattcctaccagcttctgacgagaaatgaacgagtagttattagacattacccctaccgcagcaagctcatcatgccactgatcctttaatttggtatcagcaaccaccagtatattgtttatcgcttgagattccagatacagccgtataacgccggcagcagttctcgttttaccaagcccaacgccatcggaaagaactgcagtatcaagggagtcaagcttttccttaacactgacaattccacttcgttggtgttcaaataagttttttacccaatttttactatcgtctaattcagcatatggcttaccgtacatattggcaaagtcataataggtctcttcaacaggcttatattcttgagtaatctttctagcaccatttgcccgaacgactttgattaaatccggtgaaaaatcactcacttcatcatcagatagccatagtgtattgtaccaattatgaagcgcatagaagccatcttgagttaggacatttagttctgtgttaccctgtagcccggcacgagaaaggttggaagaccccactatggcagtgccacgggcggaatttaacgatgcggcaaacagatagctcttagcatgaaaatagttagcatcccccgtataaaccttagcttcaatacgtccttcttcaatccagtgagcaattttgcctaagaattctttatcagagatacccttagcgtcagtatttgccttgtcatagataaattggtcataactttggtaattactcttatccaagacgtttacagtctcaccgttagtctcattacccatcaatattctgaaatggccattacgattatccataaaatcaagaaactcgtcttttaatagtagtaatccactaatatagaaataccctaccgcgacatccagctcgcgatattctggctgcgttaaaaggtacttcaatgcatcagtcatagatactttgcgattatcaataacacgccttgaaaataattgacgctcaattgttgtatcaaccattatttagcaccaccagttaattgatcatatttattcaaaattctctgttcatcagcatcaacgtctttagtatgtttcttagtcttgaatgtttccataagagttattatctcttggcgagtcatcttaaaattaatcattactcgtgcatttaattcagcaataagattctctgatagaatgtccctataagcatttccaggaatagactcgtccaaatcagtataatatcccttattcttctgcaataatgctttaacaatttgaatgataatgtcagcatccttaacgtcatttagctgtggtaatggaagctgcttcaagtagatctgattgatgttaattgatatcaattgccttaacacgaagtcaaaaacatacgaatttaggaaacccaaaaagaataatttttctctgtctttcatcttttgaggatctttctgtatgtttaggctattggttgctactgaatttgctggtaacaatgtagcaattaggcttctcttattagtagaactagcgactgagcgtaatgctatccgagagaaatgataatcatctcctaattttgccttagcattgtcttgattaattctataagctatttttgacgggaaaatttggaattgattcatatatttaccttcatataatggtaaatccgtagaactggcctcttctttattgatgaatttatctgcatcattggttctatggaaatcattccctaatttaataagattggaatctctaagtggcttatatgttagcctgagcttttcaaataaatctaataagtcttgattatgcgcttcaaccattgcataacgttctggttccatttgtttaaggaaagaaatactgtagttcaatttcgagctattattgtttaataagtctaaatctagcttgtagaaaaatgccttaaatttgccatcatcattcttggtatcacggttaaaagttagaacagcgaatttataccgttcatcaacagctgggaaaatttttcgtctatttgcgaaagagagaaattcttgcaaattataatcatctaataccaaatgccttaaacctgttgatccattgtcggtagcaaaattgtcaggtacgagaatgctaaactgggcatttggcttagcaagttgagtaaaacgttccaatgagactttatataaattcaagtctgacgaagctttcttaccatttacaacccagctttgatagtggaaactatcctcagatcgaatatatttagaaccagccttgatacgttcttgaacattactccattttttctcaagtgttgggaactgatcaaacaagattttctccaggtgctttttggctttcttattaggaagcctgcgataacttacatcgtattcagagaaaaactcatctgaatttggcttccaggcctcccaggggggattgccaattacaatatccagccctccatgaacatttaggttgccatcttcgttaaagaagatttcaggcaaagcaaattcaatgcatccgatttctaggaagcttgcatacttggcaacatcccctgcttctggaataactttagctgttaattcatcgcgcaatttaataaatttattaaagtcactcgatttcaacctacgcagtctttcaatatctttttgatacattttgaatactttctcacgcttatagtaaggaacagcattaaataacgtgttctggtgaattagagtacggccgatgagctgcggtaacttagtgtttttaggcttatgttgcaaagaagacagcgtaagagtcaaactggagataattattgctttatagtcaatatcaactccgtaaatcatgtgtttgagaatgtaatcttcccattgatattgactatctttggagccgttcaggaagttatatttatccttaatctcttgaggatagtctaacccggcaagcagttgatactggtcagctaactcaaggaatgcgccacgtaagaatgagcctccaccacaagtaaaatcagcaattttaaggtccaataaatggtcaagggccttagctatttgctcgttttccttgctctcaacggcctttttgacgtcttgatagcggttctgaaactcaattgacacagtttgctttaccatatagtcaacgaaccgctgatctgtatagtaggctcccttattcttttgttctacttcatcatcaccgaagaatacaaccggtttattggttttcttatctaatgtaatttgcacgttttgactcattgagtcttcgtattgcttttcaatggcttccggcggcatatcttcaaacctaaaactatagttacccgccttagtatcaacgtatggcttaacccattccagtttgttttgcttagctaattcttgatcaattttggttgctacctcaccaatactaccggcaaacaagtctccaccgtaagcaagcttgaattgctcactggcctttttactaagctcggtaaggtaatctccgctattttcgttaatttgaacatgtgatgtagcgtctagttcatcaggagtaaaaccattgtcgaagaggcttaactgaccaattggtgttttttggcggttaagcttttttattttagattcctcgcttacattttgtgctatggtaacagccttctctatcgcttcatcgagtgtcccattgcccacacctagggcaatcccatcaacattaaaagagtcagccccataatatccttctaggaagcgacgcattaattgtcgcaatgaaatggtatccaccacagtggacaagactgatttgtaagagtcactttggactagattattaatgtcgtttcgctttatgtaaactttagcttgatcagaaactaaatcatataagtaagttttcagatctgatgccgtaatccattctgacaacttcttgcgatacatggataccattgtaaggaagttagaagaaagctctctacggaatgctttcgcatcaatctttatttgatcttctgagccaaatgggctggattcaacgtagatgttttcatttcttaaataattaaaattgcgcttatataagtcgacgtcaatagtgtctgggtttagatctaatcgtgtatcacgatttccacccaatattgggaaaaacaccaaccgttttttcccaataaagccaacagcagctacggtaaattccaagtttaactggttgtccttaatatcaataacgtgttcgtaaagttttctgacctcaacggttgaggacttctcgtttaagtcttcaaccggtaagacagctataaccccactgtcattgttatcggttttatccgtaaagtagattctaagattactttccggatttatagggtttttcccaactgtataatcaagatagtcagcaagtattttagcagaatattcatcagcattcatactattgattagctgtgcttctctcgtttcattcatttgtcatccttcttccttcctattttaaatgagctcccgtcatcgtaaacctccaaaatctatattatctaggatatgttcacgagactcctggtctaagcccagataattaagtgttactgcttcactagaatgatttagtaacttcattactaaaccgatgttatggttcgactgttcgtagacacgataagcacccgtttttctcattgtgtgagtgcctaagtaattcaaaccaagtaagtcccctactttactcattatctcataatacgtatggcctgaaatgtgcttttcgggatctgcaaaggacggaaacagccaaggactatcataaactttaacgtccggattttgcatttgatatttcattaaccaggtttgataaactagaagatctgattcaacaggacgcaaatataatgtgttctgttttttagttttctgatcaactatgtatgcattcttcataatttgtccgttatcatcaaaaacatctgacttctttaatgaaattacatcacttactcgtaataatgttgccttccctacttgaaagattgtgtaattacgacggccatacttaaaattatctcttagggtttccaaaacttgttgtaaaatctgtgtgtccttgattgggaggactaattgcttcaaaatatcacctctttcccatagactataatctagtatatctctagtatagtctattactgaaaaactgtaaaattaagttgttgatttaacagtatttagcatagactataattacattatagtctatgggacttgtgcgatttatgacaatttacaaaaatgcctctcagacaaaacgaaaatgaattagacgggtaattcatcatcttagtttgtctgagaggcattttataataattagtcaaaaagctactttctagccttatttctagctagatatcaagctgattccaagaagaatatagtttaacccatatgtaaatttcaattattattcctattatgcaaagcaagattgaaggaatgataagatcagcatttctataaatagctattaaattaacagtacaaattaaaatcaaaaaaataaatattgatttccagtgtttcagtaatccgttaatttctttttcggccttagacattttatttatggccataacgaaaagaattgctgtaattatggttgatactgcaaaagcacctgtagctacagcgtaaacatataacattttgttcccctatttctcttttctttaagtgtaacatcttttagcttcatttccccaataaataatatgtaatatattttatattatttattatttatgcttaatctatgtgaactactcggccataaatgaccgagcttctgggaacacgaagtagtatttaggatattacacaagtattcttgctacctaacttacagaactccgttcttttaccaaggctagttcctagccaacggcttttaatcctttttgcaagatgttaactgccgcattaacatctcggtcgtggtgaacgccacactttggacaagtccattcgcgaacttcaagtggcttcttgccactgttaaagccacaatgcgaacagatttgactggtatagtttggtttcaccaagactagttgtttgccataccaagcacacttgtattccagcatcgtccggaactgataccaactagcgttagcgatcgacttcgctaagtggtgattcttttggagattcttggctttcaaatcctcaataacaatcacgtcgtactgcttaactagagccgtcgttagcttgtggaggtaatccttgcgcttgttggcaattcgttgttgataatgggctttaacaagtcgggcgcgttgccagttctgataatcattgagtgctaacttggtatcttggtggttgtgattccattggcgaacggcaacggttgcccggtggcgccgcttgctgaatttactttgccacttcgttacttgatgttctaacaatttagcgttgaaggtaccgtacttgacaccatcagaactaatcgcaaggtcggccaggcctacgtcaagcccgaccatttgccccgttttcggtaaccgttcaacggttgtttcaacttgcagggagaggtagtaacgacccgtcgggtcataactgaccgtataacgcttaattttggcctcaccaataagagtcgttttactcgtgcgtatacttccgagttttggtaattgtaaccgccgcttggcaagtaccttgcacgttgatcggccagtgtaggcctgataggccacatggcggctcttaaagcggggatagccaccttggtgcttaaacaatcgtttaaaggcctcggtaagattatggttcaccactaggaaactggtggaatcactttccttgagaaagggatattcacgcttgagctgtttcaagaggtagttcataccatactcattgacgaagtggctactgggattgttttggtaacgctccttagccatactgagcatttggttccaaacgaagcggtcattaccaaacatttgccataactgatcccgttgggattggttagggtacaagcgaagtttgatccctttaatgaccttgttcattctagttccacctcctttttccgttgatcatcaatgtacttggcaacggcttgttcattaacggccccaatactttcaacatagtaactgggcgaccacaagtgacggccctcctttttccaatagcttcgctgtaattccggacattcccgaaatagctgataggcagtaccgcctttcagccaacgaacaatattcgtcaccgataatttgggtggtgcactcactaacaagtgcacatggtcgtccttcccaatttccatgtgggcaatttcaaagccatatttagcggcgatctcatggataatccgtttgaaggcgatctcgacccgaccggtaaggactttgtttcggtatttggttccccaaataatgtggtaattaaggttgtagaccgatgttcggccatatgtaagtctgtttgtatctttcataccaacgattataccataattcacgtttcccatatacgcccgtcgggcgtaaaaaaggggggcaattcatcacgtccttaaaagaacgtgtttccttgccccttttcataaattaaaagaaggcgctaattattggaccagtttcaaaaaccacggtgaatacttatttcatacagtaccaaccgatgaaaatgggaattacaaactcgctgaagcaaaaaaactaggtaaaacccctgcatctcatggatgtattcggcttagcgttccagatgctttatttattcagcaagttccagcaggaacaccggtagaaattattaaatagttcgcgcatataaaaattcaatttagaaatttgtaaaagggataagccagagaagacttatccctttttattaaacgctgtttgtaaaattaaaccaatttccgtatttttacacatgctgattcattgattctaccatcaatgaatccttttttctttttttcgtaagtcaccgtccccattaaatctttcgatcctatgatactactagattgaagaatacattttaatttaagaatccctttcttacagttaacaagataacctcccttgagagagttaaaggtagctattttgacgtaagaatcgtcttttacaataaaataatttaacatttcgttcttattattaactgtcacactaaaaatttttaccactttagttttcttaggaaaatatagaataagatcagtactttggggttcatacaattttgtactactaacagtaacttcatattggttcattactaacgttcttcctttctaataagctaactagtgtgcaaaattactagttaaataaatggacagttaaaaaatttagttccacttttaaaggtactccatgactgatataccaggggattttcttcactagtaccatccatgagattgccaaaatgattgtgcattgctccatgatccataacgtccagcaacatattgatctgcgacttgctcttggtgtgcaggagaataatcaccacccagatatgatgaagataattgatatttacctacatattggccatttcgagcattgtaatttccgcctgattcacgcgatgcaatccatgccttagctgcagcttcgttgcctgtggcatttgaagtataagaacttgaaggtgcagcctgctgactcgttgtttgagcctgattattagctgcaggagctgctgattgttgttgagattgaactgattgaccggattgaacagtcgcttgatctgactgattagtcgaattaacttgggtattatcagaagtagattcattaatgcttagtgtttggccaacataaataaggttaccatcattttcaagattgttatccttaacaatttgatcaacagtagtaccattcttttttgcaagtccccaagtagtatctcccttttgaactgttacagttgatgcatcagcctgagtagttgcaaacgcttccgttgtaccagtagccacaactccacctaatagcataagtgcttgtttctttttgatattcattttccttatcattactccttttcttctttgtctaaacatactttataactcatttaccatcagtagttatcctattcaaaatatataaaaattgcttttccttgggtgtctttttttgtttcaacatagttaaagtaacttattctttttaactttatggatgttaactagcaaatacatcatcatatatccagttgaattcagaagagttcaaaattgcgtatttgaactccttacggtactcaaaacgtaatacaaaactattcggtaataatataggcattttcttgatagcaagtggaaaacgttgcttatcccctacataaaatgtctgatctagtgtctgatatttaacagcatttacttcctctaagagttttttatcaggcctatgagtaactcgctctgcgtaaacaatacactcgtatttattatcattaactctgctatatagcagatcgaatattgttttcttcatgataaacgtatttccgttatgaccttctgcaataacatccccgactcgtgcactagctatgctttgcggtgccatttcttgtagatatacctcgtttgcacctgttaacttggtcaatttatatttttttatttgtccttcactaccagaaaaaacttcagcttttacaatggaaacatattttttcattaaatctccccctgttttcctgataccaagtttttctttcccgaaatgtcaatttaagttagaaagaaagtagttgctcatcagtgacgtaggacatgaatacctcatatggagttcgatagcctagtgatttgcggggcaggttatttcgcttactcatcagttgggtcaccaattcatcgggaagattgcggaaatttagccgttttgttaagccgtcccggcgtaaaagaccgttgttgttttcgttcagccctcgttgattgggagcaccaacctcggcaaagtaagtgtgaaggtcaaattgattggcaatctcgcgccagccggcgaattcttttccgttgtcaaaggtaatcgatttgaagaagtgccgcgggaatttacgaagccactgacctaagtgttggttaatcgcatcagccgtcttttcgtgcacattgagtacaatttcgaccttcgattggcgttcggtcagggtcattaccgctccttggtgctttttgccttggacggtatcagcttcaaggtgtccaaattcagtggcatagtgcggaaagtccttggcacgctcgtgaatacttcgccccaattggccagccttcccgcggcgctcaatatagccattcgggtgccgcttacctcgcatgggcaaagcacggacatccaaaccgaactgcccccgttcaaacatccggtaaagagttcgctggttacaactaattgggcgctcagcgcgcccaataatggtatcaggcgtccacccctgggcaattttgtcgttgatataagtgagttcagccagtgacaactgagtacgttttcggccacaacgttgcttattgcgcatatagtgatcttgataatcagcaattgaggcaccggtttccaggtaacgataaacgcgataaacggtttcggcgctacggttgatcatttgggccactcggtacgctttaagcttttgcacgaaagaatgggcgatgattgtcagctcgtttgtggtaagatgggtgtaagtcatttgtggtttcctttcttttgtttaggggtattcaaaagtctaccacaaatggcttttctatttttctaacttaattttacaaacggcgttttgcaatcttaatttaaaatcccagaatgaagaatatccattctgtttgagaatttttgaaattttacgggtatcagaaaatcctaacatcctggttaattcttgttctgttggattgtctttcttctgacaaagtacttcataagtttggtggatatcattcatagttataacttttttataatgttgatattttgaaattccataatgggtaagaaacatttgtaatgaaccaaaatatgacattattaacctcattggcagtttataaaaatgaattaaatgctcccaggtaaaattagtctctcctgactttattatttcattcattctgcaatctatttcttccatagtgtaatatgtttgatcatcaagatatgttgcggagatctttgcagtttttataaattctctccagcttccaaatcttcgtacggcagttccacttcgtttaaagtctcctggatgaggtgcatatcccccgttttcttttgtaatttgctgcacatcatgaattagtacttgattcgtaaccctttgaaccataagcatatccccccgtatttgattattcgctgtaatattaacaattggatttagattgaagagatttacttatttattcaaaaaatcaacttttagcctaaaaaagccatcacaaaaacatttcattaaaaaacgaaatatctctgcaatggccaaaattaattctaaatattttttgttcccagaagctcggtcatttataaccaagtagttcacacgatactttggctattcatcattgtcattgcaaacagccaaaacgattatatctccctcaagaataatgctaataaacaatgcacttaaaatagataagattgtattgatatttggagcctctattaaacgctttacagcgacaatcaaaaagatttgaaaatatatcggccaccctattaataagactgcagcccaattcagatgtttcattgccattccccttcctaagcttagtttatgcttcattaccatctctcgatttccttatcaccctcaaattcccaatatatcgttttaagtatagcgattgtatattgagttttattaattgcttcagtttcttaaaaatgaaagaaatgggttaatacttttaacatagagagataggtaaaatcttctatactaaaaaagccaggccttaaacctggttttttagtacgcttcccctttataatttattttgtatatcctctaaattacgacgaatttctggaaacaatctatcaaagatctttgtggcatccttcatcatttgactatcaattgcttggtactctggtgaggtctcgtaagttgaatgtttatcaagtaaagctgtttgcagcccagcattatccatatacctctcaaagcaacgagcaaaaacctctgtcggagtacaataatactctggcttatctaaggtaacgtcactatgaattatatgctcacgatagcgattaacaatattagtaaattctggttgtaaactaatttgacaactctgtgactgataatcaaggaagtgaccatattcatgaataaatgagtgaaaacctgcagtaggcataaagatttcactatcctctggtccacgaaaatcaatcactatattattaacagcaggaatatacattcccatcgcatggtaattacctaagcggcgtaaacgtaaagctggtttgtttagaccaccaggtaatacattcaacacacgattaacctcgtgttcaaattcatgaaatgcatgataatcaacatcattatctaactcaagtttagaaaatgagttaagcaacgagctatgattcatcagtagagatgtatcatagttaatatgcttttttgtttgccaagctctcgcacgagttttacgcgcaatagcgtcctcgtaacgttgggaagctacgatattatagttatcaaagacaaagttacgtataaaatcaattgctctatttcgttgaacagtttcttgccattccttacgactaatgtcatgattctgtaatatctcggcatatgtatctggaagtgggcttttttcaaataggaaagcatacttcttattactataccgataggcaaataattggtgtaatagctcattaagagtctcacgctcaaatgatggttgctgctcatcataagcattttttatagcaagcaccaatttaccatacccaattaatttttttcgatttacatatccaaatgtaaaagttggaatgtcactaaaatatcgtacttgaccagtgtaagtatttccacaagtttcatctgtaactcggagaaaccttaacttttcacaattactagcagtatacaaagcaaagtctttctcaccttgatatagctttttatgagccttcaggaagggattgtctgcttcgtttacagccttagcactactaattgattcattatcatgatctgataaataaccatagtaagtaaggctaccaatgatggctgctgtttgctcataatcttcatctttccagtcaccatttcgataaatataaaatgctaacttacgaaagagagtatataatgtttcatttgctgttacagtaatcttactgtaacgggtaataccaaatcgttgatgcatcaatgtagttagagacatcaatgatgatttcttatgaatcttctgttttataaccatagctggtttgagatcaaccttctcattttttacagctattttcttagttggatttaccggtatatcaaatatagataattgcttaatcataattattttacctcctaaaacaaaagagaccgttgttataacagtctcttctaataccttttattcaattagttactataatttgaggttaagttcgcctaacaaattaatcctataattgatgccatggccatcgctatataaaccaccgattattattgcgtcaacatcaatcggactaagatgctttatctcactttccaattgatggttagacatgtatcgataatctggcacttggcgttgtaatacttcaatagcatcttcgatagctacgaatacctcataaacactatgatcatatggatcaaatgctattaacttcatatttatcaacccatctctaactaaaacttactgcaaatacatccgaaaaaagatttggattaccgtcaaatacatgtttgaggcttttcttaattccatctaaaatgggtatatctttgtcagtaaagtcatttaatagttttttatcactacctagttcgataatcgagcgacataaagcaaatcccagggcatttataattgcgtctttcagttcttcgatagaatgaactgctttcttattatatggctgaatttttggtacatatatataccatccattaccgttaaagccttcatcatcatcaatattagcccagcttacatgaatgccatcttctaacgtctcgttatattcatccacataatcaaataacttacctgaaattaataagctaataaaatcaaccgataatgatttcagctttattatattttccgaatctactagttcatttactttcaaaccatacccatcaacaatttttaaatcctgtgacattagtgtgtcctcctttaattttacaaacagtgtttattaaaaagggaaagtacaaattagtttcccttttattttctatttaaaatttaaaaaattatttaaaacattcagcatactcatcagtaacaaataaccgaagtcgtaacttagcaaactcaatttcatcatagatatccttaccttcaaccaatggtaaaataccgtcatcaatccactgattatactcatcttcagttaaaacagtttccattaattcttcgatactgtcacaaaaaatttctttatcttggccattaacatcaaaataaagtagaaaactgccatctggcaccttacctattcctgtaaatctacaactcatcttaaacctccacatattaaaaagtactttctcaaattccgttatgtatgatagataaaaagatactttacataagcatcccccttttcaaaatttaaaaacaaaaaggttattagctaaaaaagctaataaccttaattacgttttgtttaatattaatttatacaatcaaataaacgaacacatgctaattatgtgctacaaacacaatcaaacgaaacttactaaacatcttagtaaataaataataatcaataatctttgattcactatctattctagcattactgtaaataaaaaggaagcccgcaagcttccataggtcttttcgaatgtgttaaacatttcttgtgaaaaagacgtattttatcaatgtaaggccattacaacttttaacgtgacgagcttattggtttactattttcttcaattctttataaaaattctcgtgcggacctgctaaaactacgatgacaatttcatcattatcattaatagtataagcaattcgataatcaacacgatcgtatttaaatccataagcaaaatagctgcttaagtcgccctgcttttcatttcctacatatggatcgtttgctatcgtgtcataaattgcagcggtaaaactctttttcagttgcctattttttattttcttcaaatatttcaagactcgtttggtagggataacactataggccaatttccttctcaaactcctctctactcatctgcttgctatttgcagcttctttcgctgctgcatcaatcaatttatccattgcagtaggtatatcttttttcatttccttaaacttactaataagcttttggccttcatatccttgagctaccaaatctttcaaaatatcctcatcaaagtcaaaaaaatcgtcttcgttaacgaactcatagaaaattcccttgtctgttaatcgtgggcgtaactttgttccctcgctaacattaaatgctttaggaacggtaaccgtaagagcgttaccttgttttctcgttttagtaatatccatgttatcacctcagcattattatctcacacccgctcagtaattactagtaattatttagtaggtattatcaaaacttattactatgtctacgtatctgttttaccaacatttcctcccaagctaaaaaacgccacagaatttgctctgcgacgtttttgtttttatatcacatatcaattacaaataaatatatcattatcttatctaaaggcaacatctagtacgaataatgatccttccattttatagcaatcccaaccatggatttctccagatgcaagtctgtccatacattcaacgatagggcgtgctaactccatgtattctattttgctatgaactgagttattgtctgcaaataaacagttatagtttgtaccatcctttactttctcagcatctagcttaacaacattagtaattttattaagctcatttgttattgttaaaatttccatgataatttcctccaattcttattttctctaaaatatctgttttactttgccaactgcttaatcgttttaattaacgatttgcaattaccacaactaattgcgttattaatttgaccatctttggcaatattctcatcagtgtacacatcaactattgactcgctgccgtcaacataaacattaaaatgcaaattttctttgtttccacccttaaggaacttggtaataatctgccattgtaggccgttcattaatggcaaaatttctttttcttcattccataatttgtcttgtgctgacatttcttctgtgtataaaatttccattttattcactctcctaaaatattttttctaacttaaaattaagccggtattttcttgtaacgccaaccatgttcgtcaaaataactcataatttcccaagtatcatcagttgtatattcattttgtaaaaattctttccagtcactaattcccaaatgattcattgctttaattaatcgctttttattgaagtaaacattaaacatagtaggacaatcacaaaggtaattgtctctgttatcataaccatcataagctaatagcattttattcgctctccttaattacttcctattctagagtctaaatttgttgatcttctcgaatgcaacggtaactagtatcagataccacaaaaaaatctaaaactctaattccaaggatgctaccagcattctcaaggcgatgaaatgtttgtatatcattgttagaaaacacaagtttaccggttggatgattgtgacctatgatgatgttgtcggcattgcaaagcaaagcatgttgaaaaatagctttattgcttactaatgcttctgttgaactacctaacgcaattggtgcaataccaatcaactttaagtggcaatctaaataaaatgcatagacatattcctgtgcagaattaccaattaaatttttcaatagttctcctgtaaactcacttgaagttagttcttggccaattccgttactaaatggaatgttatagctaaattcttcatgctgaattttaactgaagagaacattttaatatcttgttttttagtaagtgacgtcataaataaccattccttttcttatttaatttcctgaaattttctttttaatacaagtaatctcgatattctactgagaagtcattaatcaaatctaagtcgatgtttccatctctatcgataacaccttcaataattttggctttattttctcgatatgcttgttttaatactttaatccaacgttttgggtcaattgcttcatctaataatctttcgctgtaattatcaatgttattttcgtaataataacccaattcaaagtcaaatccgttaccttgctctaatgggctacaaaacaaatcgtagtaaaaatcccacagaacgcatgcaataaattctcccttaatagtctttttctcacgatacttatcagcataatgtgtaagcactgtatcaaatgtaatacttgcactaagaaattttctccgttgttctggcgtcgcatcatgccatactttactcttaactaattcatcaacactaaatggtagtaaatttgcatcaatcatcattttcttcactctcctaaattatttcctaatatcaaatacaatagaccttttcaatcttaaagagacttgctaggtattatgtctactgcttgtacttgtcccaatttactaagccgataaaccactcgcactaataattcataccaacagttgtctgcataatttttagcgatcatagtttctggataagagagacacttttcctttttaaagtcgttaactacaaaaggcttttctaacgcgttagcagtagccaatactttattgatatcaaatttatcaacaatgctcttgttacctaatttggatattaagaaattattatgacattggaaattttcaccaactaccttaatacctggttcgaacagcactgcttgattattaacaacatcccagccgattgatttaccatagcaatcatcgttatcctggtttagttcatgaatatccattactaagccactaaaggtattgctattttggttttggactgcggttgcgatatcttgctttaacagtttattagcagccgtaagacacgcatcttcactatcaaaaacgccaagcgatgcgtaatcaaacatattctgcatatcagatttcaaaacatataatttcttcattaaaaattcctccttaaaaaataaacaaaaaggactatcaagtgactgataatcctcttccataaagtcaattaactttatgattaatatctaccaccatgagctatagaaaatagctgctttatataacgtggtttgtaaagcctcattaatttctttgcaaatttttttgaatcttaacaagtctgttctaaattgagcagacgtttcatagtagtaatcgtcatagacagttggcccataaaagaatccagaagtagtcggaaattctttctcagcgatctcttcattaccttgttgatccagcactctatcaattcgtcctacaatatcatcaattgtcacttcatcgactttagtaacaatgcagttatattctctattcgagtgaagttcatccgaattatagtaccgttcttcaaaataattttgaatctgattagccttacgataattagtcctggcatcttgaacgttaaataaactatgcataacaagctgcttcccgtcaatatcgtagacaggaattaaatcagtaggtgtgcgtggtccatcatcaaaaatgatacttgattcaagatcataaccagaaagatgctttaaaatatctttcttcattttgtttgactgtatcatgttgacagaatccttttcagttacaatgttcacaccaagaaattgatctaaacccatgttaaatccatcctttcattatttgtaaaattcttattcataacctaatttttaacagtagcaatatctggttctaaaaacactttattaagggtctttgcaggaacccaactatccttatctgaaatatcaaaataatcttctgcgtatcgaaaaataacttggggatcatctggaaattcgttatcacttaaataaattccagaaaccgaatcagttaattccaaattacttgcatccgcgtagtaatcaatggagtacacttctccatttgcgtagtttgtaaaaagcttcaattcgtcatcaaatacttccaatacatggcaacgcacagcttttgtaatacgactaacatggtactcttgacgaatgtctttaagcgatacaaaaatcatcccgcaaattgcgtaatcaaaacctgcatccgttccacggtaatactgaacttgtgtatgtttaaaacgagtaactggttgtaacaaatacccatgtttataaccaagttggtaaaacgcatctcgaaagttctcaaaacgatgcgaactcggattaattaattgagcgtagtcattttctccaagtagttggattaaactatcttccatattttggggatgttttccgtcatcagaattagacccatcatcaaataaccataacgtagctagattgtcccattcacgtgggttttcgccacagccatatgagtcatatgacaactgcacagcttcattggtctttagatttattaaatacataatctttactcctttagttagtaagcaccttgctacattgccatcaagcatttagtaataaacaatcactttaataattacattagaatgattgctaaactttttaccaaaagtattacctgccttttcaccctacctggcaacataattttttaaaataaaagaccactaattattgattagtagtcttaaatccttattctttataattttatagaaaacaattaggcaattaaatgtagccaattccttatagattaaaattaaaaacgtttaatatatactgagctattattaaaaactgacgctttggtaatttaccgatcagcttggcgttccgatttcctgaaggagaaacatcgagagtaaaaatctgaccagtattcaccttacttggttttgttaggccttcatcttcaaaggatccatttagggatactaagaatggtctactctttgtggtagatgtaatgggacaaacaataaccaaaggagatgaacgattatattcatcccgactaataaccaaagctggtcgtcttttctttatctcatgtcctttagatggttcaaaatcaacaattatgatatcaccttgatgaaacttattcaccttctgcacctcctggcacaaagcctgttgctaaaccatctgtatccatatctttatactcattttcagatacattagcataaatatcaggtaccttaggaattaggatcaaactgccatcagtttctttactaataaaaaattcagttccgagttcataacctaagcttttagaaattgttagaacaagtgagtttccttgttttctgattttagcagtttccatgataatttctcctttttattttagtataacacgtatcactcggtattacatatggtacatatatacataaaagctttgtgagacactattatggattcttaactaaaacacaatcattaagaatatttttaacttcatcgagataatactgagttaatgttgtagtattaggaaaccaaatcaccattggataatctacccatgtaatttcttccttaatatccaaaacagcttccacaggcctatgaaaattaccttctgttagttgtttataaactatttgtattcttttcttagttgccttaactcctaattcttgcaacataattttaatcgctaaatctgctgcctgtgaatatagggctaaatgcgcattcatccaatactttgtatcaatcaatttttcattttgcttattggtttttgcaacttctttaattgtggttgccatgtttaataatgccaatttttctttttctattatcttagtattcataaacagtttccttattttagaaaattacttttagttccaaccataactggtttcaactacccaattatctttagttaagtaatggcaactttcgtcccatgtgcgtgacaattgaaggcccaacgcttttaagtcaatgaagtccattgggttcggtgcgccattgtaatctttttgatccaaatgtttatcagcataccaaccttcggttaattcgtaataggcataatcttctaagctttcataaacaaatagctgatcatttttccactcaccatcatcaaacatttctaataattcttttgctaacgatggatcatttgcttgcaaatcatcaaaattgtcgtaccaggaccccgcataatcttcacatctttgcattttgatttcctcctcgtactattgaaatgaaaattaactgaatattatagtagtaattcactttaatagatcatattccgttgcgactcggccattcttattagttaaagtccaaaatgtgttgctatattttttataaacaacatttttcttaaaacctcggaatggtgttttcttcaatttaatagtaataataggtgaattgatatcattacctgctaaacgattactaattttctctaaaattctattaggagtttcaaagtcactaaaataccagatagaattttcaaaatcatccattgatattcctctagcgaatttcggcttaagacagcagtacaatttctggccctcatatactaaatctttgcaatctgaaggaccgacaaagactttccacgagaaaagattaggttgtgaagttacatctaagtgtcgaatacgaacttgacgactgtacacattaaaagaatttcgagaattatttacgtattctttaaccggtaatgtttctaaggcgaccaaataatattcttccttaacccttataagctgttccatacaagtatcaccatagtaaatttccaatttagcagggatagtttccactcttgaaaagtatgttaaagctttattgaattctctaataaaaaattcttgtgcctgcgtagtttctaattgtgtttgaaaatagctcactttgtccatctcctaaatatccttatgttatttccgtcactaaactaattaaataactatcattcagctatcagattaatcccaatggatagcaaatatatactctaagatagcttgcagttatatacattattactgctatagtctctgtgctgtcctattttccaaccatgctcttcaaataccatggtactcataccaatctcatcagttagatactcattttgaaattcagttaaagtatccgaattttctcgctcttttaacgcctgttttaaatacctgcgactaaaagaagcattaaatatatcattaccaacggtggtacttcttgaacgattcttcattactaatactctcatcttttcctccttgatcttccgatcgttatttatccgtacataaaaagagaacctacattggcctcacctccttaaaataaaagatctaactaattaattagaattagttagatcctctactagttattcatcattttatctgcagcctcaaacaaagcatcccattcggtatcatcttgactattattatccggcttacttttcacactgctatctgattgatgcatagaactattcgatgatgtaattgtttcaatctcaccaggttgaagtaaatcatcagtttcgtccatcttgttgacatcatgatacacattttcttgctttgcattagcgatctcattgaacgttggtcgagttaaatctttcgttacgattggttcaccatctgtattaacaagaatatcggtagctggaatagaatcatagtcaacatgcgtttcatcgctttgcttagttggttgctccttagcacttttatcaagatcctgagaagcaccctcattatcttttcttatatcatctatttttactttatattgaggagcaattccatctttacctagctctggagcttgtggaacaaacggttttatactactcaatatttgttctctggtcattaactgtttagttgctatttttttatcctcatcatgtttgtcactatttgtctttttcaaataatgactagcaaaacgataaacggaataaatcaataaagcaactatacttaaagctataaacaataaaaaaacagagataattaataaaattggattactcattttttcctcccttaattaataattaaattttaaaattaaaaaaggacctcaagaacgggccttaagatccttaaaaagatttctgaattaaatgttaatgtttataaacaaaaaaataatgatactaacactggtatcttacggaacgaaactactacccacgattgggtaaaaagaattgtaaatcaattcaatataattacaaattaattatatcaaaatagcagcaaaagttaaatatttttgaaacaatgatattattcaatcctaatttgatagaatctaatgctgaaatgatttatctattctcttaatattttcaatttgtgaatttttgacgtttaaattttaagaattatggtattaaaaatagtatttacgttttagcttattactttatgatatgcttatatttgaaaggagggataaaaattgaaaatggaagttagctttgaaatgactgatcttttgctcggaaatttcacaaaccaacttaagactgggtatcaattagatatggtcgatttatctgtccctccgattatttctttacataaagcacgcatagataacgttaatgaatattctttattaatgtcaacaatgtgtaaattagatggacgaattctaactctcaagactcctctagtttactcatataatggggatgtcaatgatgacctcaatttggtttgggaacgctacaaggctctgacaaataaaaattctccatttctttcaagaatttgtgatattttaaaatcatttggagtacagacagtccagataagaactaatactgagtctattaaaaggccagaatttcaaactattaatctttaatctaaaaattgctattccttataaataacctcctattttgaccaatcgaccaaagaggaggttattatccactattatagtgaatcactcatgcaacagtatctgaataaagtaatataatatcagaagcaataaatttatttttctcagtatcctgctgcacttctaccagtttacgatatattattgaaccattatctaagtcatctaccttaaaattgtacaagacccacctgctatgtgggtaggtaataaaaagtcataaaaaacattatggagtaataagtgtaaagtaattacaggctaatcaaaaaagcagtaaataataactatttactattcttaatcatattcccataaagcatagtagagaaaataataactatacttgcaatcattctgtaattcatagtttgaattgcgatcattgtcactgccccacttaaaaataacaataaataataaacacttttctttattatttctaacatattagtttcctttccatgttaaatattcttgaaatgtttcaaaatttatcaaattatttgttttccaatacataacttcctcactttcatcaccacttttttctctaagttcaataaccttttttaagataataaaaacttcttcaatagcggagcttgaagaatgataaaacaaagacttgtcattgatgcgtttttgaatttgctttctaacacttgtaacccattttttatctctcaattggtattctaatgcattgcagtttgcaataacttttcctcccatacttgtaagtactttacacaaataacctgttactgtagtatttccatttgaattacaagtacttaaaactaaacacggtttaccatctaagcgtaaggtatgtgaccaagtagaaagcttttctaatattaattttaaatctgacgaaatattatgcatatatactggagaagcaactacaaaacagtctgatttcaatatcatttcttctaactcgtaaattttggaatcaccatttctttgagtatagctaatatcatataacgtattcgggttgagtctcatcttgttaaagtctctacaaaacaaatattgaactttatactctttgctatctagattgttaaagaggctttctaaaaagaattgcgtcgacccttgatatctacaactgccgttcagtactaatatccgtttcaaattcatcatcctttcaaaaaagaggctgggaaaatttttcaccggcctcattctttatatcaaccttgttaagatatcatggggattaaccacaaggcggttaattactctagcaccatcttttatgagtaaaataagcactaaatgctgcaccactaccccaacttagacattttccagaagatgcacgtgatacttgaattgttgcccgtgaaatcgcagaagctgctggtgttgaatccacttggtattcacccataccttgaatttctgtcattttttgtaaactcatttcctcaaagttattacctacaattttttctaattcttctttgtccataacaaatacctccctttaatgatgatgcatagcatgtcttgttatattggctgtaagagctgaaaaggcagcactttccataaaatatccaggcgtcgaatctacttgatattcacccataccttgaatttttgtcatttcctctacagtcatactttcaaacgaattccctattacaccttctaattctttttcttccataattttcaccccctttcaatttccaaaagtaatggattagttttaagccctttatgacataataaggataaaccgatacccgaaagtccatcaaataagcctaacgcagaaaactttccaaatcttctaatagaatagtccttatttaatatgtaatttcctagcataatattagttagtaagttggtcttttccttccatttagtagaacccgtctgcataaaaagttcatgcataatcataattattcctgcttttccgtggcataatgtatcattccttggcgcattttctaaatcatttaatttttcttgtgcgtaattattatcaagttgcatataattacgcgctaaaagcattccagatactcctttacaccatcccatatcattcttcacaggagtaatttttttcattaaagcacttgcttggtctagctgcccaatttcatataagcacattgcgtctccacaattaccatgcgcaacaccgaatttacctgaatgcataatacaattcataaactttttttctaatctattcattacattttgtgagatgtatttaaatccaaataatcttttctgtaaatgtaaaagttttataattccacctaaaccattaataaaatcactaattagttcgcctttttcaatgttttgctcaatcttcttttcaagctgttttaaataagccacttcttcataatccaaagttttataaagactataatgaaataataatgggtatagtggcgataaaaatcccttaaaggctccttgtacctccagatctaatgacatattaatggatgcttttaatagtttcttcgcaaattctttatatctagcttcgtttttttcatatcctaattgtataaagaatactgttacaccactaattccacaatatagactttcatccataggtaaaatatcccaattgcctgcattattgatatttatggtcgaaataataacactattttcatcttcgaatgcactattcataatagtatccgcaatactgcttgcttgtctcacataattaaattcttgatctaacaaatctcgacttttctttcttacatcagtgattctatctcctactgataaagaagctaatagaagtcctctttctttttctatcgtttcgtaattgaaattattgattctatctaatgcaaggttaagtcctgatttcttaaaatatgcatcataattttttcctctactatcagtaatacttgtcttcccaactacagcagaaaaatagggaacatccccaaacagtaaatcttcaacttcactatttactattctcttatcatcatatggataagcagcaatatttaacattagcctttcacgatatttcatttcaacattataagatgggtgtgctgcataatttaacatcgtttcataacgttctgtactcttcgttaaaatacgaattctaaagtttgaaaattctttaacttgtttttttaactctttaatattattactaacaaaacttgtcattttgttataaccatctagaatcgctaatctatatttttttacattaacttctttattattacaggtaattggaatattttccccgcctttaacgtatccttgtcttctcatttcaaaatgaaaatttgaattttcaatatttacgggtacgagtactttatttttcaataaagtttctcttccttctagtccacttagttctatcgcttcattatttcccattggtaatttcgtgggtaataagcaggaaccctttatcgaatctctattcaaactcattaaatattttccaaacgcgttttgaggagtaattaatgaattttgaaacatcgtttctccatcaacaagaattggttggtccttttttgcaattatattctctaaatgcaaatcgtttagccctaataaataagaaataacaataaggtatccataacgttcataataatcggcacattcgtctttacttattacaggaacccgtgttacaaattcaaaaaaagcataatctttataaaataatcctttaggtaaaaaatctatatcaagtaaagttgaactagacttattaatccaattacaaaacttttcaaattgctgaagaattctaagatcacgaggtttatatactatttttttatgatttaattctaagattataactgtatttcctttgcaatgggaatctcccactccaatttctatattagttaagacaatgttttcttgtttaagatgtaagaaattacaaagatcatttctatgggtgccaattgcctcaccaagttttgataaatttgtcacaaaaaaattgacgcgcgttattattattctagataaggttggatactttcttaaaaacgctttaaatctagtttcattacaaaagttttcttttataaaagacgatagtacatctgtatcagcttgactaattcttataccagattttattttctcttttttatatttatacaactctagtgctagcactttcccactttgtctaaataaatcattgattagaaactcactcatagcttcgctggctttagtagtaattctaatttgatgattccacccatcgtctatcctctgcattgcatattctacaaaaggcttaaaaaatacatctagctttaatttatgcaaatgtatgttactaaactgaaatttttcaataatttcaaccaattctttttcgaaagggatctccgaatctactttaattaacggttgtaatgttttcttaaaatcatctaacagcaaatgggcattactacagtactctgttaaatcctgttcattaaataaagtgcgtgtgtttttccattctttataatatttatcatccagaaacggtttactatatatagcacgttcttcaacggtaaatgcatccgttaaatttaaggttttcatattacagtcctccatttgtatttatattttaaggattttctataaaaggaatactttttttattaaacgcaccatattatgaataactgcgtttatagctaacttcaaaagctattaactgtttaaggttcattctgtataaacaaacatatgaagttttctaaaataaaaaccgtcctaaaactgttagattgtataaccacaattttagggcagttttttcttaaattgttttattattcacctattttgagggttcatattacattttttgtcatcctatgaatttaaataagtttttttctttttggttaattcttcataggtaccagcttcaactattttcccattttttaatacatatactttattagtggacttagcaacagctagtctatgagtaataaaaagaattgttttatgtaatgtcattaaatttttaataactttatgttcagtaatgggatctaggccactggtagattcatctaatattaatatttttgctggcgataaaattgcccgagctattgctaagcgttgactttgaccaccagaaagaattaagccaccttcatcgagctttgtgttgtactttaagggcatttcatcaatttcattgctgatacatgctattttgcatgcatttataatttcttccatactcttttctttatcacatccaacgatcaaattatccatgatagatcccgagaaaaggtatgtttgctgaggcacatagcatataaaatttcgtaattgataagtactaagttgattaatcttaactccatctactaaaatatctccactatttgattgtaaaaatcctacaagtaatttagctattgttgattttcccgacccactttgccccagtaatgccactttctcatcatttttaatccgtaaatttagtttttttaaaacttctttattattagcataatgatatgaaacattctttatcactaattctcccttgcttaataaattaagattattttttctttgttgtagtgtgataccattttgttcttttttcgaaagcatcacatcatttaatctatcattcgctacctgtgcattttgcaatttgggctgtaaattaattaaattttgaattgaactagtaaagtaactaaataaagcattgaatgcgaaaagttgtcctagtttaaaatcattattcattattagatatgctgcttgccatattattaaaatatttaacactaactgtacaaaaacttttaatgattcttgtatcgaattagctatgttatatttcatcaaagtttttaacaagttagtaaagctattttcgatttttgcataaaattttgtttcagaatttaatgatttaattacttctataccttttatactttcaataagtaatgcttctaactctgcattcctgatcattactttcttacttaatctatcgaataacctagtaaaagaaataattattacaaaataaattggaaaagaaaatactgctagaaaaaataaatccttactttgaaaaaataaagcacttcccaacgtagtaacaattattgtatctagaaaaagtgtaacgactgaaccagctaatgcttctgtaattttatttgcatcattaaaccttgaaacaatatcacctgttgttctagacgaaaaaaatcctatctgcaaatcaaataatctttttataaaatttaaaagaatatttttcgataagttctgtcccaatactactagtgcaattttttctaaaaaagaaaaaattgcactaaaaaagtataggattatcaatccaaacactattatagatagtaagttatatttactttttggaatcaatgaatcaattacgaactgtaaggataacgaactaattatatttattaacaatgtaaagattgcaaatagcaaaatttttattagaagcaatttattactaaaaagttgcttaaataaatagttaaaattagattttctttcatcaataggaataaagttgtctgctttcgaaaaaaatattgctgctccactccattccttaataacttcatctatttctttttttatggtccctattgttgggtctggatcagcaatatacacttttttatttttaatttttaaaactacataataatgcaaaattttttcttcttttacaatatgaattataaaaggaaatggtaacttttcttttaataaaaagttgttttttgcttttaccgccaaaggctctaatccatactttttagaagcttctactaagccataaatgttcgtacctgaaatactagtattagcagcattacgcaaatgttctagtgaaactcgactaccaaattctttaagtatcattgctaatgctgccactccacaatcctcttcatttacttgaggaatataattacgataatacatatatcttcctcccacctaatcataactaaaataaattaattcgtatacaattaatattaagcgtatggcttttcgattagacgcaaaaaaaggattttacaactaatttagattcaattataattaactaaatttcaaatttattatattggagtaatgtatatgaaagacactaattatataaaaaaatctctagagaatcgcgaaattcaaaaactgactgaagatgaaatgaaagctttcattggtggaactacttatcatattaactacgatggatatgcgccaagtaggaatccatgggcttggctaactcactgggggcataaacactaataatgaactatataaatccattttacttatatgggttagaattttttgatttatttattaacacattgttaataaataatatagctggtaaaaggaaaataaatctactttcaatctttgaaataggagttatagtcttagtattgggctattatggatatacaatttacattgcatatgcacttcttttcttgtataaaaattttaaacataataagcgggtcttgaattttgaagcgcttattatgtttgtatgcagtttatttgtctttcttatctcaaacattaatagtttcattctaaacacctggtttttaccacattatagtaacgatgttttaatacgttttcaaatagtaatttctgttattatttctataatgttagttagtatttcgtttttttataatcctttattttcgaaaatttcgaacaatttatttttaaaatataaaggtccaattttaagaaaatttgtaattacttatgaagtttctttcttctttattataggtattgcttctattgctgaatatttaaaaatagaatttaaaattcaatggcttttaattttatgctttctatttctttcattaagcgtaattatactgaccggtattatgtttacatacaatagtaaaatgattcagctcgaggagattagaaatagttatattaataaacaattgtattggaaaagctttgaatctaactataaaaagttgagaaaactgcatcatgactatacgaatcttttaataacgttaataaggttaattgagaataatgactttaaacatgcaaaatcctatgctaattccttattagattacgatagtaaagtatattcgcctccttcattcgatattatacaaatttctcaaaaaatttataatcaagaattacgagcattatttttagaaaaggtgaatataataaaatctcagagaattaaattgcatttggaaatttctgataagatcgctataccgtctaaattattaattgatctattaataattattagtaatttactagataatgctacgagtgcagctttacagagtgaccaaaaatctatttctataagcttaaaaaaaacgctctctaattgttataaatttactataaagaattcaataaaatctaaaattaatattgaagaattatttactgaaaatttttcaaccaagaaaaaccatatgggaataggacttaataatgttatttcaataattgacagttcaccaaatttctttttagaaacaaaatcttttaatgaatggatcgagtttgaactaatattaaagaggtgatgtcttatgacgttagagatattattacttgaagataatcttttgcaacttcaaaaatataagaagataatccagaatagaattatgattaatcctagtaataaatcttatgatctagagcttgcactctactcatcaacttcagatgaaatacatcaatacctccataataatagtaagaaagatatttttgcctttcttgatattgaaatagggtctacgtattcaggaatagatatagcaaaagagattaaaaatactgaaagtcaaaattttagagaagtttgttttatttctacttatgataatcttttaataaatattattaatgatcatgtatcaccttttgactttattttaaagaataatggaatcaattacgttaccaaaaagattcaagagaatattgactgggcttatttaaaatataaagatttaattactaaatctaatcaagaattatttacatatgagtctttccccggatatattcatcgcattcctagagataacattctttttatatctactacttctttgcaacatcgtttaagaataacttgtaaagataacgaaatactttttcagggggaattaaaaaatattgattccaaaaataatgcattctttagagtagatagacaaattttagtaaacttaaataatatcgattatgtcgattttcataaaagaaaaatcttcttcaaaaattctaaaaacaaaaattgtaaaattagtctacgtaaaatccctcttcttagaaggctattacaagaaacgtcgtcgccggtcacccataagaaacaatgatattacattatatcaagagttgaaattttgcgtatttatttaatgatagagcgtagtaattcttcatccaaaaaccagcaagatctttaaatttgcagaatgataattaggtgaagcatagtagtatcactaacacaaacaaagccccttggcaatcatagtcgattgccaaggggctttgtttgtgggctactctcacgaatttcttaacgtttatgatgcttcttatatactttctgatctaactgatagtagtcatcaaaaggttgagcgttaacctcttttaggttcataaatggatctccagcctgcacatatcgacgaattggaaaattccatttatccaattctgttgcaagttgtgtttgcttccaagcttcataggacttctgatactcagcggccttttctggatcttcttcattctcagctttctttctaagtcgttcaatgcgatcattctcgtataacatttttatgtcatcttcaagaggaattccatcttccgtccttcttatcttgtaagcaaaactgaatgtatccatccacagaagagcataaccatttatattagctcgaaagaccgcaataataaatccttgtatatctgccattaagttcccctgccaaactggtagtgtctttcctagataacgaataaaaatcgttaatggaattgatctatctaaagagattggtcgttttaattctttttctggcgaaatatcaaataagaagtaacgaataggcgtgaattgagcaaacaaaagtgtttttaatacattaccactagccataaaatacaatgcgtcaagaaaaactgcaccccagcagcaaactaatgcaatccgggaaataattcttaattcttggtccattgaagtattcttaaggtttatctgccgtggtcgcaaaatcacacccccgcactcgttttagaaaatatcctttaatccttttgtaaaagtatcaagtaaattaatactctcgtaacctggatgatttgaaataaagttatgcatatttggtttagttggctgcatcactgcttcattaatataattttgaataccattctgtctacttctgaagacattaatcatatcacccttcaagttcttcaacttagttggatctgcactagaattaatcggattaacctgcgctttatctggatcgataacataagtaccagcagattcatgaatgggaagtttgaattcatatccactatccatccccggccaaatagtgttatcaaattgttctgataagactttggtttcaccatcttgaggatcaacaccagtcataacaacaccatcgtagttaccacgaatctctttgttagtaaagtgagcaaagtcatcaccataaactcgctcaccattggctagtgcccggcttgtctgcggagcatatggcatccccatgtaatcactaatcttataagggctactacccacacttgcactgctatttccactaacatcagtaaagtaactaccaatatctggtgccccgtatggcaacgatatcggaattcgtgattgaccactaatccgatatggagtagtggggcgatgcgtcattggatcaactctagtagttaattcaccacttggtgacatatcataatcttggtatgcttgttcattagcacttaggctaccatcaccagggcctaaattcccaatagtatggtagttaccagcactatccttagcttgaagcattgaataattatttgtaattactgaacgcagagagcccggagcaattcccgtcggttctccttgatcattccgctcaatcgggatcatgtttcgtacatcatccatcgtcatactatgaccagggttactgtacggattactactagtaagattatcaatgaatccactacctgatgtaggttgagctgattgactggcaagtcttcccatcctaggattacgattaagcatttgcgatccaaagccgaataatcccattacctgccttgtcatcctactacttgcacctgcttgagtagcttcagcggtaatttgatttaacttggcccactctgcttgtgattcgttagtagcagcataatttcgtaagttttcatcgttgaaatacttctcataatcagctggagtagcaaaattactctggtcatttcctaacatgtttggtgcataaatctttgagatatctgcacccgtgacgggtcttccactaaccgtcatgccacgtttacgcattgcataagctcgttgattttgtacttggttcaggagatcctggttaataactcgcacagtttccccatgacctgcaccgatggtttgaacaagacttttaccttccagaccttctgtagcattcagtaattgagatcttaacgcaggagtaacatttaatgcatctaattgcgagtttaaattatcaccgaaccgattagcgtcaatcatgctgttattaaattcagcatcattggttaaatcagtatgagctacaactcctccattagaacgaatatatgcttgatcaacagccttcatttgggcatcttgtagaccattacgatattctgcagtctgcttaaacttagcaaattgttctggagtcattgtctgaccagttttaagatcataagcctgctgagcttggtgtttagccgctgctatttcattagttgagatgggagttcgtacatcagcagtagcagcacccgcagcacctgcagccatttgtgaggctgcattaagatttcctcgcaaattgttcattgccttattagcgctggttatcatcattgcctgccgttctgattctggagtattgtcaaaatcgtgttcgtgactctttttccaagaagcataattaaatcccattgcttgtgcctttgcctgaacttcctgttcagtttttggcactccatgagctttatcataaattgaaccatctggtaagccattaataacctcacgggcgttagcttgcacatcagaattagggacaaagttaccgttaatatccttattcttttccatttgtatacgctgctgtttagcgttctctgatggcttataccctttcccgttcatactattctgataggctttaatattacgcttagcagcagctcgatcgtcgtcacttaactttgaattattatctacttgatcaattaagtcattgccttttggtcccggattggcatcaacacgactttgctcaaagtcatcaagagttttcccagtagcatctcgtaaagctttaacgtgttgattatgcgcccggttcatattagctcgttttaagcctagtttaaccagtccaccagcttgctggtttaattgtgcagcacgggccccaatttcaccaccagctactgataatgcagccatacttgctatattaccagtacctgctccaatagaagcaccgataagtcgaccagcgttagggccaaccattccattcattcgtgccagagcctctttagctttctgcttctgcatataagcctttccatttaactgttgaatagcatttcgacgtttcagcaatgatctactatccagagttccatttttctttgctgcttcaagtgctgattcatcatgttttttcttcaaagcttcagccgcaaatgttgcaccgtgcccagcactggataaacctgcagcggccccaccagctaaacctaacgccgcggttccagcaattgctgctcccgtagttaaggttcttgaagtagatgagtgtatacgatctaacatattcgttccaataccaaataaatcagcaattcctcgagaaacaggctggaaaagcatcaagataataaatcccatgactaacatctcaaagtgactggcaacagttaggtccttaccagtcattgtagttatttgagtgactgccgatgaaatagctccaggagatgtagttgatccagctagtgtactaagagcttgattatctttttctttagccgcattctgagcaagacttccaaacgttgatgaattaatccacaataagaaagtcattaatgtcaatgtaaatgcttgaatagcttgaataaagatagttccaatcagatcacgtaaccaattcattgttcttgcttttccaaatccaaaaggccacatcgctaagaatatcggtccaagaatgatcaaaataataaacaccagcatccgtgcgaaataatagaacttaatccaaattgctagtccaacagcagtgcataagtaaataatgacgaaaataatacctgcaaagccgtctcctaaccaattcccctttgtaatagcattaatagagttgtcatcggctcccaattgcaaacaagtcgtcatcaaagtatgaccattaccattggacattccttgtaaaaaattagcaaataattgaagaaatgctccgtccaactgcaatagcattctaatgaagactgggagcaaaaaaataactgatacagaaatcataatatcgataaagttttgataccattctgcccgtgattgtgctggactgaaagcttgtccccaccccatctttgttgctccaacaataactgctactactagcataacagctgctaggccatacatagcaggactaatagcatcaattgcagcactgaacttagaagaataggcagcagaaggaaacattaattgacttggatgattattaatcttgtcgttcaattgactagcaacatccgcatcttcaactttgccgtagccaccatctgttattggattgtaagtaaagacagtccctgcagcaccattttgttccaaccatttgcctaaacctgatgcccagaaaatatgaagtaaagccgaagcaatcttagacttaaacgatgagtcttcatcacttttagaatcatcacttgcctgttttgtatctttgttaatatctttattatttgcttgtgcttctttcttaaattgtggatcactttgggataattgctcttccagatattttttagcagttgccggcatttttccatccttcatgcctcggtcttttaaccctttcataatttcagcatacttagaaggattactcttcttcaaacgcgctaaagcatcccctgttgctgcatcccgtttagcgatatcacgctcataagtattaaagtcatttaataaagctgctgatttttcaccggaagttggtttatgactagggtttacagctttagcagcattatatttagcataattaaatgggcgaccaaaatagtacctaataggatggtcctttttctcttgtgattgttgcttagaatagttttttatccaagccttctgagcctcctgagttgcagctggattaaagactgaattagcagcgtaagcagtcgttgatacaaacaaaatgactaagataattaaagaccatttaccttttttcgaagaccagacccgcttaaaaaagccgggacttttctttttcctttttcctttcaagagttaagcctcctttactgtaaagagttattaatcatatctacaaagttcttctgttttctagcttggccgactgcccggtttgattcagcaaatttcatttcttcaggggatgggttggttctaatccaaatactttccccttcttggcgtaaaataccctctccaggttcagggttaccagtcagaatgtctaatgcgccatcagtcaaatcaacagtattcttcatcaattcacgatgttcaggtttggtggccaaaatatatatgaattctgagttagtaactaaggcctttgctcgtggattaccttggaatcgttcaatatcttgtgtaagccagcataacgaaccatttcgtttacgatctcgtcttacaatcgtttcaaagaactcaaacattactggatcgtcaataaattgtagaatttcatcagcatccagtacttttttagtcattgctttagacggattcaacatccaacgttcccatagatattgggtaataacataataagtaacctttttcatttcaccgcttaactgtgaaatattgaagtttacgtatttatagtcgttcaaagcagctgaacgtttttctccaaaataagtttggccatcaaaaattggacggcttcctgtacgaagatatggtttgagaccgtcaatgagtctagttactttaggatcttcattatcatcttcatcagtattttgatcgatcaatgcttgataaatgtcgcttaaagtgggttcaggctttggaagcttttcatacaattggccatttaaaataccaccatgatcttcatatagagaatcaggatctgcagtaattcctaaatcatcaattacctgtttaattgcactttctaatcgacttttctcactagtattcatccctctatcattgccatctgccgataagattaggtttacaaagccatcaacattattgatcatttgagcaactggtaccttctgcacatatttggtcccatcctcatgagtagtaattttccggccatctgagctatatcgaatggcatcttctatttcttcctcgtccatttggtgaccgttctcatcagtcataatttcttcttcaagaggagtttcagaaactgaaactgcacatggattaataatgaagtctgcgtctgcagtgatagttaggttcaattggtgtagttgcttagctagcattacatactcaccatcaggatcaattgaacggtgttcgtaacctaacaagctaatttcacgtgccatcttaatcttattagaggttgacttacccccaccagattcacctacaaagcccatattgtagttaattggtcgatgcgtattggtcccaaagatattcaagaactccgtattttgtgaaggagttgcttgattaactccaaacggaattcctccattaaaccggccggctgcattacgggcaagatccattttagccagtgaacgacgatcaacatttcggtaaatatcatctaggttgtacattcgtgatccaattggaattgattgtagatatccactttttactcgtttagcaaacggtgtaattgatatcccttcattggctaacagatctgatactgttcccacatttcgattcaattcccgatcactagtaccgtatacaataaaggagattgccacatcatatagacggttttcatcaaactgaatctgatccaaaaagttattaatatcgttgtacttagtgatattttcacgtaattgaaatgtttggccttgctgattttggaaaatagcatttgagtgaataacattcaaaatattactcaaatttttcattgattcccgtcgcgtacgtggcactacatcaatcgtgatatctacgtttccctgagcaagtacttcttgaaaaatatttgtatcaagcatccgcggatatcccgatggcggaacataaacaggcattccatatgtcctactctttaaattttcgcgcattacaaattgttcctgcatgaggtcatctgttgaccaatagctgggtcctataacttgtaaaatacttggctgacctaattcagttgacggagcatcctttttctcttggtattcctcgtttgcttgtttattttcatcatcaatattggcagtatcattttctaaattttcatattcttcataatcttgtgtattttcttcgtcctcgtcaccaaagtttacatgaagatcttgatcttcattaatttgatcttggtcattaatctcttcaaattcttcgtcttcatcatggtgacgattacgaaatcttccaaataatcccataattttcctcctcatctactggtcagtatcatccacttcagtagaaactgttgtagccggttcttcattcaaagctctttcttgctcctccgcatcctttgctttttgttgttcaattaaagcttcacgagcagtgttgatagcctcagtttcaatctgaatttgcttaataatttgtttaaactccttatcattttgatgtgaactagtaaaccaggtaaaacgctgtttcttaactatatcctccaaacgaattcggacagaactatccctgttaaaggttttatacaacacttcaactaatccaaacgtatccagctgagataatgaatggtcggcacgctttagtaatccatttgcacgttgaatttgtcgagttaatttttccattgccttctcgtgtacttgttgttcaatcgcccgtggagtatcaccaaagacttcatccggcttaacgatagctaagaactgaagatagcacttattttcaaagcgatctgttgcacgttgatactgtaaggtatcttcaataacttggtcagcatatgctttcatctgctcattcgtgcctcgcagatattgtgaatgttttttcaaactattcaaaaagtcattcatttctacacgttgactctgtgatgtgattttaagtggtgccgtaacactattaaagaaaacttccattacttgattattattggctaactcttcatcagtcttaagatacgggttagactgagccatttcagcaagcatgataaacattcgagaattatcaccagtctcatactcaatcatgccgttactaattctaattacaccgacttcttttaaaaggtcctcaaatgaccgccaatcatcataggttaaatcttcatcataaataggtgcttctgctggatcatcatcaatatcctcttcaacctcatcttcttcatattcttcatcgtcttcgtctctatatgattgccgatcttcaattggattaccattccgatcacgtggggtcatatcaaagtcccgttttcgccggcgccttataattatccaggctcctactgcagcaactatacttagaccgagaaaagaaaatattataataattgtgtccaccttcttaaattttatcgaagttaaaacaaacagctaaccgccactaaaaacggttagctgtttggtttagcggcgataatttctacgttggcgttttctacgacgagaattattacttcctttgccaccagggtgaccaaaactaaaaagccagcgccaaaagccataatcatgaatcgcttctgactgtcgacctggtttaattagaacaagcaaaacaacgcctgcaccaatggtaaaaagagctgcgaaaaatgccatcattccaatagtttgatcagaaaccagaatattgagcattaaaaatgcccagattccaactgtccaccagatcgcattattgcgatactttcctcgatcagtttttttaccattaattctgcgaacatcactgttcttcattatcgttatcatcctttcttactaacgcatatggcaaacgtgtatttactgcatgatgattagtttgaatattcaaatacgtcccagtttcattttgttcaaatgctcgatcgatctgtatctgcttactcatgtagtacagaagatttccttgacgatcccgtattggccaaaacgctatgtacaaaaatggtgcaatagcagcagtgaaaaaaagtagtgctattagtacagctacacttgcacttgctccgatagccgttagtaagaacttaataacggtaaaaactattacgcctaatacaaggcctatcgccgagatactgacttgtccccaagttgcaaaacctaagacactcttttgttcaccagacaaatcaacaattaattcttgtcttccatttcccatagcgactctccttcaatcatctatcaatgtctttcacagatcattaattattagtattaacgtttaaagccataccaacgatttgctttgcgtgaatgacaacaacagcaccaataataatgaatactaatcctaccagagtttcttgacgttgccgtggatcgccaaacatagctgaagtaccgatcttcattccgcagataattgctgcaataactaaaataacagctgctaaactggttaatgggccaataaagccagcaaaaacatttccaagcacgtcattatcactaggaacatctacatgcttttgaaacatagatgttggatcatcatcagcaaatgcttgaatcataaaaaatttacttgatagataagctactaataccgctaaaaatgagcgacgtgatagcttacgcatcaaagtactcttctttacagttgtaaacattgttcgtaacactcctttcactgattttaaatagcttataacaaagaagggattactatctctaattctttgtatattgctacaaatctaatcgtacgggaatgagcattttcgtggttacaatattcaaattccacaaaaatgagaacctacattctattaatatgtatgacgtttttatgtttatatagtgggtatattttcttgaaaaaggttttctgagcaatttccataacgtaaattagggggatgtttatgtaataaataaccaataattgataattttgaaatgagattcctatatgtttatcgttaaatcatgtgatttaagaagcacttagtctaactgttgctaaacgtcttggactatattagaaatggaagtaaaaaaatatgtaattaaaaaagccatgtgtggtaaccattgttatcacacatgactcaaagctttctataccttcatacctgtcaatatattattgtacttacctctaattaatcctaattccggaaactgatgctcataataagaagaaattttttgcattaaagactgcttaataatgctatacagttcattatctcgatagtcactgtccgaacggattaactccgaattaaggccaatttgctttaaataaagttcaaatgatttagcaaaaacttctgttggggtaatttctgccaaacaacttttacctttacttctagctcgtactttgtcagcgtaagtatttacaatttccaagaattcaggctctaagctaagctgatgatctgaatatttaaaatccaagtaatgcccatattgatgagcaaatgatcgaattcctgcatgagaaatggcagctatttgatggccacttcgaaaatcaagagctattttattgctagtcggtacatagataccgtaattatctaatcgaattaatttaattattggttttgttcgtcctttcggtaataaaggtaatatatgagccaattcatttctaaataatttcagaagtgaagcattatcctcttcactagtaagcgaagcaatatatgcctctaaaccggaagtaactaactccttattagtatcactctcattcactaatagtgcttgatctgaactcataatatatacctgttgtagagaccacgaacttatttgatgtaaataattttcaacataacggattaattgattatgcttatttagattttgccaaacatccttatctctttcgggataagtctgataaaacttttcttttgtccagtcaccctctttttttatcaaaaatagtctattattagtgacaaaactgtttcgattaatgagtaattgctgaactaatttaagcaaatcactaaaagaaaatatcaaattctcctgatctcttgtgtattgataaaaaatatcatttagaatttttgcataccccatgatagttaatggtgactcaaaaataatccggtagtttctctttcctttcacatttaacattctgacttcaccagccactttcaaccgtgaggggtcatcagtcaaaataatgaaacgtttgtatctatcatttcgttctggaataatctggatgatttggtccgttttaccacctactactgacgaaagatcattacaatttttcacccttttgactgctttaatccactcgtgattttcaagattattttgtccgaattcaagatatgatcctactactttactagctgatgcatgagatatttccatatcaatattattcttggataaataaactgcagttttttgaaactttacgatcaaactctctgttttttcaaaaaataatggattactacatttaatgccaaggcgacgtttaagcatatcatttagcttttccgtcatctgacgttttactggtttcttagtaggatggttaaatattagatttagcgataattgttctcctttaatcatgttttttcctccaaacaaaaaaccatcaaattatttgaacttgatggcttccttttatgtacttctaaaattaaaatgtcatgtctgttactcaaacatttctcctaaaaaaacaaaaaaaggataactttctataaagagtcatccttttttattaaaatattatatttttcgatactaaacaaaatttactcagcactacatagtgaagaaaacgaaactctgccaacaacggcaatagataaatcaaaaaatgattagataattacaagtcaataataacataatttaattaatgttgaccggaatcacttgatttttagttggtgatagttgatttttcaatctgtttctttagatcatttattcccttaccgtgattaacctcacggataatacgcatcataactgccgttgaacattcaaagtaattgctaagcattttaacagttacacgctcattatattttcttagattcgtgtaccctgctacaactgatgcacgtgacaaatgtaagtgactatcactaatcccataatgtttcttaaagttcttaaaggatccaaatacccgaacaactatttgtactgggaaatgatgcttttttgttagttgatgccatgtaaattcttgctccccaactgctttaatttgattaaccttatagtcaatctcctctaacgaacagcttgaccctttgataggcgtgtagggtatatttgcctttttcattgtctgctcccatgttccaaaccgtaagcgggctgttgctgagcgcttatattgtcgatagtgtggcggatatcctaatttatagtataaagatcttatttcctgcaaaatctgttcatttgatataacaccaattcgatcatagtatgctttaccctccatttgagcaacaaactggttccacgtatgatacttttttaagattacgcctaaatgaggcatttcacggctaagaggtattctgcccttctcctccttaattttctgataagctaccctaattccttcttcaactgccttgctatccatccttaactcctattcttgggacattttaccgattgttaaaagcccactcatgatatgcttttgtgtaattgcctcctcctttttctccctttaaacacataatatagccaatcactgcttgcttatcgattggcattggctgatatttatgctgggtaagcaatttcacttttcgtggttgagctatcttatagtcaactttttctttgtatatacctttatgatacttcttgctccgtgatctgaataagacctggtcattcttttgtaaaatgccaagttttcggaatgcagcatcgtagtttaaccacacatgatctgatactaaatttccttcttcatccttaagattcttcaaacaaattgttggagttaatttacgatgacctttctcaatacgatcaatcctttttaaggctaaatgatcaaaacttgcggtaaatgtttgaagttccccggttccattttttaatgattctcgcatattcacaacaccttcttttatctcatgactagtttagcaaatttagatcaatcataacgatttttagctttcttttttattcctacctgtaattttttcatacactttggtaaaataaaactgtattttagatttacttttattcttgctaacttgtttagcgtcttttcgttttctagtactttgttgtactttttatttttcgtttactttttaatcttgcaatcaaactaggactttagctctctaactatggtccttttattttttaaatgtttaagggggatgcttatgtagagtatctatttatttgtctgttaaaaatactttgatttggaggaatatataatgacttattttgatttagcttgtctcttattaggcaagatgatcctatttatggtaacaattttaattctcggtttcttgctttttaagctagcaaaacactggaggattattgttaaatttattttaatcattctttattgtccttttttctttttcaaacaactgttaattaaaattggtcattcatcaatctgtcataattcttaagaggtgagcttatgctttttactattattttcatgctaatattggctctttctacagtggtatttggttttatttatggtttactctacgaataccgaaagccgttggttagattagttcttattattttatatcttccaaccgctttaatcaccaatgcactatcctttattggtaaacgtatttaaaattattcataaatcccactagctgaaaatgttagtggctttttttgtacatttttttcaaattcttctcgatgtattgtagtgatagtgtacttcagtagttttttcagttggtgagactggcttttcaatattaggtttagtgggaggagtaggtttcttttccttaaatggagtttgaggaattgtagtagatggcatagcccatgtataaccataagttccctctggtccttgaccataaacatcagaactataagtcatagtataactgttacttccaggtgctattagtcctactgtagccccatagtattgcccggcttctcctgaattgtcccaagctatccatccatcctgaccatccttataatttcttattaaaagatcgcctttagtaaaattaccacctggtataccatcagctgaatacagatcattgttttctaaaatagcataactaactgaattgtcagcattgaactttagacgaatattgtcattaacaaagacggatcccatcttaccgttgccgaaatctgctatcgatgatccggccagttggtaaaagctaatattatttgttccttgaacatattcgtgtctacctttagtagcatttggtccagcattaagactggaaactgttatccaagcattattatcaaaagtgattggattgtcattttcatcaaaaagctgataagttactgaaacaggattaacgcccatgtaccagaaaccttctgtcggatcagtattgatgaaaagtaaaggccaatcagtactattaccgctagtcgaatatttttcaacgatcttagtaatcttatgattattaccatcatcatcagtatatgaactgttttgaagattagtaaaagtggcagtaacactaaaattaccttcattaatattgtttgcaacaaaagcgtactgggttgaaacttccccatatgagttccgacgtgttagcgtccaggggtatttgccccatgacaaatatttagttccactcatatcataagtaaaaccagtctttccactttgatcagcatttcctagattccaaccattggaattatttgttccttgcgcgttactaaatactacttttgccctggattctttgcccaatttcaagccttgattgaccattccagagcttataacattgccatgcattgcaatgttatttttatctaaatacgccgcccaatccttgttgaattttttgagatctgtttgatatttagccagatctttctgatattgctcattttcttgattgtattgtgccaatttttgttgatagtcagtattagctttattgaactcatcgatatttcgtttctgagtagaaaaaggaaaagcactaataaccttgttatatcaataactataggaaatgtttaataggtaaaaaaagcaaaaagatatatgattagccggttatttttgactaagttatctttttgctttttctattttattaagctgttttggggtacttttttaccaatactctttctactcagaaacgaaataacactgattttgaaaatcaaattaaacaatacaaagaaacactcgctaattatcaaaaagatctgacatcatctgtcaaaattgatccacataaagtgatcgaaaatcttagtattaataatgatgcaggagctattggaacagttgattatctacaagcaccatctcaaaaaatcaatgctcctcaagcttcacaaattaaagatttagagggtgctactacttcagtaggaggttactatgaccatgatttgaaaggtgatttccttagagtaacctttacaaactttaactcaaattctacgtatactgatatgaatggtataagtcatcacattggtaaaattattgttacgtattcaaaccttaatctcatacctcaacaaaataggaattcttctcaaagaccagcttttgtagtagcaaccaaatcagttcctggacgtccgtggaatggagttgatacattaagcgtactaggagcagatcaacgttttgatttctatgatgatgctgggaactatattcaatttattcctggaactgcgtggatgccttttggttcactaactcgttcatggtctggtattcatatggatcagtatgacgatgatcatattgaaatggtaaaagctatttcaaatgcaaaactttatgaaattccagggggtaacgctaccttacatagtgatggaaatgtttattcagatccaggttaccgaattcaagaaaaaggtgctgtcaattcacttggaaatgacgggggtgcaggaattgcttcaattcaaaacggggctacattccgactttcaattcaaccttttaatcatagtgaaccacaaggagaacataacggagatactcctgattggaactttttcatcaataatactactgctttagaaggaatttctcttaaggttccagttcgcaaaacgacgtcaacacactatcactacaatacaaaaaagcgaaaccacaaacaagtggcttcgctatgtaattaagtattagatttccttgaaacgtatttccgttcttgctacgagagcatcatctattcctttagcttttttcggatcccaaagtgccatagttactttatatcctcttttgtgtaacaagttaatcattgatttataatgatcacttacttgaggatttttaataaaatccatatcaaaagcaacagttactctttttacatgtaatttttctaaggctggtataaattttctgtaagaagcaacacctgcaaccgctagaaaatcatgaccatatttatttagttcttcctccgaaaagttattagggagttttgcagacgctactaaggcttttaaaccgccttctgttaaccatatagatttttcttggctaatataagtatttatctttgcgtcataaggctttaatttagcaatttcttgccggtatgcaacttgaactggtgtcttgtcagaggatcccatcagcttattagcagatgaaacccaataatatttaccaccatagataggcttaaatattatcctatctttttccaaaacaccacatcttataataatgggcttatcactttttttaggaatttttccataagtaatctctttaccatagggattagctttgttaaaaacttttacatggtatttgttagtcccaaattcaaaataaatcttaacacgccagttttgcggtttctcaataatttttgccttaatcgaaacatgatcgactcgtgtttgaaaacctattatttcattctgcagattataatatggaataagcattccatcagtactgcctgagaatactgggtaagaatacactccaggttcgatatcaaattttttatttcctccatcatatttaaatgaaatatttttttctaatttaattttcttgagataaaatccagggacacctttccatgattctgtggatactccaacgttctctaataaagctttccactgtgagttcacgtagcctttattagatgaagatatgtcaaatttagctgccttaaaaggcgaaatgttatactcttgtattcctttttttgacttgtaaaaggaaccaaaacctcttgtcccatgcaaaagaatctcactaggagtcaatccacggttaataagagcatcatagtgatgtttggccaaaggatatgccaataatacaagtcggtaaagtacatccttttggtcgtcattagcgctagtaacagttaagttgttattaaccttagatggatcaaattcaacttttttgccatcattaatcttaaataaatgccctccagctactttaggcttattatcatcagttgatctcatacaaatcactttagttcctgttgcattaactagacaccaatcggtatgatgacatattggacattgagcgccatcaaacgtaacccagtgaatgttgcaacttttataatcagtgtcaatcattgatgattcatgtaatcctccaggaaattttttatttaataatgttaaatccatactcataaaaacacctccaataaaaaaagcaccataacaattatgatgcctaaatacctaatttatgaaaaaatattttaatacaaaaaaacgaaaaaactgattaccaccggtaaaaaagaacgaaactactaattaactctatagtaaaaaattaaaagtaatacttaatacaagctaattatagcatagaactattttcagaattctgtttttcgaaattaaaggagacattaggatttgccaaagaatctttgaaaatacaatagcagtaattgttgacaacagttgctgctagaaaataaactaaattatgagaacttaacataatattttttaaatgctttttcacagggacccttgtataaataactttatatttactgcttttgtaaactccaaaatcattacttctatgttctatacaatttttgtaactatcattcagatctatataatctattacatttacttttacatcagacatccttataacctccaaatttattatttcatagtaagtttaaaacataaaagtctctgatagtaaaaagctaaaataaattagttattgcttattgttatagatgaagaatgactatatttgttttataattaatttaaagaattctcgaagagattcttgtaaactacatctaattaagagggagtcaccatgctctctcttttttcgtattgtagtgatagtgaatttgagaacgaggcgtaggggtttctggaataattgttgttggtgtcacccacggaccatttccactttctttggtctgatttttaagaagagcatatctaactgtaaagtcagagttttgcaaagaaattaatccggctccgtaatattcattaatacccttattgtcccagctttgaccatcatgggcctggaaatcccaggtaccatctggtccatcattatgattatctgcatacaagctaccatcatcatgggccttaattgacgatccagctaatccatatgctttcccaccattaataatcttagcagtttcagtatttgtaatagtgctgtttaacgaagttacggctaaccaggctgtattattcttaaaatcaatttgctgatttgcctgattataaaacttgtagttaacattagttcctgttgtattaagatatccgaagccgtcggtaggatcggagaaaattattaagccatgtttggtatcacttgcatccgggatatatgttgcaacaatttttgagatatttatttttttaccattttcatccacatagaaagaattttgcaatccagaatattcaactgttaattgcccgctttcacctgaattccaagaatagacaatttgagaattactatctatttttaaatcttttttcatttgggcaaagcttgaagtattagtgccatactctttttcatttgctgcagaatcccagcctcgtggccagaaatatgaatcatcacttttgcccgaagaactaataactttaagttgagcgttaggttctcgaccaagtgttaattgctgctgtacttgatcagagcttaattcattactactaaaattatgatcttgtttccactgatcccattttcgtttctgagtagaaaaaggaaaagcactaataaccttgttatatcaataactataggaaatgtttaataggtaaaaaaagcaaaaagatatatgattagccggttatttttgactaagttatctttttgctttttctattttattaagctgttttggggtacttttttaccaatactctttctactcagaaacaaaagtatgcagattggaaggaaagtgtctctcttaacaaagatggagtaaccatttgggacattaagaataacctgcaacttaatcatgagcctaatgcggccgttaatgtaaaacaattggtcgctgccgatgcaacggctggaaatggtaatgtcctatattacaaaccatcaacacaaacatctggtgattttgttcaagttacttatacgaacttagataacagttacatcattgactctaatggacaaaagcagaaaattgctaagattgtccgtacttttagtgacttagcaaaatcagcatccgctagttctattagcttcaaaaagggaattttaagtaatgattggcgccagccaaatctcgctggagatgatagcacagctttactgattaacactgatccagcgaacggtgctatgtatcttaatgctcttgggataacggtagaagatcattattatgatgaaaatggcaatcaaattgatggtgatggcgggtactatgttctttcatctattaataataacgatggctttgataaccaccacgagcatgttaaagccccaaacaatgatatgagcgctatcgctgttcacggttcgtcagtatctgttcagtcggatggctctctatctagtaatatcggtaatagtctacaagacgttcatagtgatggatcgtactctgattcaaataatactagtacttttaataactgggataatgttagttctgattatttctacttcggttctggattaatgcaatacacatctaatccagggaaacttagattttacacgggaatgagtggggaaaacagtaatgatgatgaaaacgccttttggttcactatcaatactattttgccaaaagttccagtaaatactgaggtacactatcactacaatacatcgcaagcatatcttttaactccgctttaacacttgctctctttctatacatagaaattagtttttttcattttttgacaaaaagtaataataaatagtaactttataattgacataatatctattacgaagctactttagctataatatcatcttacttaaccatagtccaacaccatcaaaacaagtttatttttaatatttaacagcaaataaaaaagacaccttcaatttagagggtgtcctttttacaaatttttactgaggattactaaatactaggcttttcttttacgaattcctaacgaagctaatcctaaactacctgctaaacttacagcagctaatcccataacagcaatattatcctctttgttgcccgtctgtggcatttcagaagaatgactggtcgtttgactaggagccactgaaattggctgagaagcgctaacgggtgctgctgttggttcagcagtacgttgtacagctggagttggcgtagatgctggagttgatgttggagctggcgtttcaggtgtcttaggagttaatttttcttccggagcaggcgttggctttacatagtttgttaccgtattagttggtgtagctttaccaaagccaaattggtaggcggtattagaaaatgatccctcaaactccttgttcaccttcactggtaattgaacctttaacttagaacctgtcttgacatatttatcaaagaattcttgtggatcatctgcttgagcaactacaaatgtaccattaaagcgtcctgctaagtgattatctttaatttgttcctgaataaattcaggggcttgagataaactagtgtacttatggaaggtaattccgttaaccttcttaccatcttgatcaactacttgtgccttactcaaatcatttaccgttaaggcattagtatcaatcggatcagcaaagtagaagccctttttaatcatatcaggagtggtatttacatccttactattagaaagatcccaggtcatttggtaattaatgttttgatcattatctaccttttgtccatcaattttctgtgaagaatcactaagatcctcttttacaggtgctggagcagttgctgtcttaattgaagcttgattagaagtcgtcttaagagttgcatttcctttaccatccttgaagactgtctgctgatcaaacttattaggaataagttttgattcaccattaacttttgtccgtaaatcgataactggcaatgattggctttctgtcttgttagcattatattgctttaagagttgatcatcatcagtgaaagtaagcttttgaccatcctgctttaagtgaacaagattagtaatatcttgtagcttattatccttatctagcaaatatgcattatatcctacaaaagtaagattactatcaagattttctgttatcgtccgagaagtaagatcttcagcacggttagctggtaatggtgaaacactaagtggccatgttacaactgtacctgcttctacaagtgacccagcaatactgttctctgtatcaccttgtacatcatcccctagttcaacatcttttgtggcagtaggcgtaaatgttgagacattaacagtattagatgtcttcttctcggtattctcaccattggcgtccttgtacccccataatgattcaaacttattaggaatagtttttgtagctgcagttgcttttgctactaaatcaataattggtgtcttaaactctgttcccttgtctttgttatatagacctagtagataattgtcatctgtaaaggtaagattttgaccatcttttgtaagcaatacatgattggtaatatcttgaagagtaccattagcatctagcaaatatgctttatagccaacatactccaacccactatctagtgtatctgttacaacatgactagtaatatcttgtgcacgattagcaggtaagccattcttatctgaaagaggataggttacttcggaaccagaagcaattacttgaccgttgatactacttggcgtatcaccctgtacatcatcccctagttcaacatcctttgtaggattttgagtgaatgtttgaatagtggtttccgaaggagttcctggaacatcgttaaccgtaacggttgcaacattcttaaaagtagagccgtttggcacatctttgttaatcgtccaagttggaacaattgtaacggtttggccattggctgttgaaggatccttcaaactaatagtagctagtccttgcttattatcattaatattccattgatcggtaacatcattaccattatcatcagttaccttaaacgtagcagtaccaacatattgagcataatttgagtagttttcagtaattgtgaagttctttaaaccaccctggatatctgcagcaactggtagggtagtcttaattgaagcagttgcaacactaccatctgaaaatacttgatggtccgcaatattagtaccatccgtaaaatgcttatcaacatttggagtgtagttcaccacattgtagtgatatgaagctgtaatttcgttaggcatagatggcttcgaaactttagctgtattgtagtgatagttggctgaagtggtatttagtttgggtaacgtaacagtagccaccggtgcagtttcaccccattcggcccacgctgggtctccataccttggataatcatgctgaatgcttgttccagaacgatcatagattgtgattaagctccaagttccgtctggattctgtatagcatcataactgccatgataatccttaatagcctttacttcttcctgcgtcttattattgtgtgcgtagaaggcaagtgatcctgggaaatatttctcctttaacgagtttccgtctacaccagtggcatctccttgtttcccaaaaggccatcttgttggatctttaactggtgcaggatcaattgcacgtttaatgacataagtgtcccagaaaccgccacctgttttaggtgctaatcctgatggaatcgttaagtgaacgttagttacgacaactttcttacgctgtaagtcgtagtgccatgtaatatcataagttggatgagcattcatgtatccaccattatcccaattaacttgccctgtaacgtgttgatcttttgctaaatcatttaattgagattggtatttagcatagttttgtttctgagtatcgatagctttatggatctcatcaccttgagactgataattcttttgagtgttagtagcccaattttttagccccgtcgtatcttctgcatcaaatgaactatcagtatctgaatccttaacaacagttaatccaggaatattttgagcatccttgacatcttgatcaagttgtctagtgtctccgtgagtctcattataagtttgataatttgactgttgcattgcactacgctttgcttcatcttgtcgttgctttaaatactgttgttgttgattataatcatcctgaatcttttgatcgatttctgcttgagaactaccagtgatagtttgatctggatcttgtgtaacactaagatgtggcgtgttttgtacactttgcaccgcttgatcgatttggtccttatgtggataggttgtaatcgtttcttgatttccattaccacttgcttgagtagtagccacctgtggttgatctgacgttgtagtatcagcgtgtgcagtcgaagctacactagttgcacctaatgcaacaagggcaacagcactagcaaagagccattgcttcccttttttgtacattttgaaattagtttgagcagagtttactgcttcaattttatttctcatttcaaaagttcctcctcaataaaaatttgtatttatcaatacaacattgattattgccggaacgtcaagacttatgttgcattattcaagtatcaaaaaaatgagaattctacttcctgcttatctgagttttttggtaaaaagtctttttgttaagggggcgatagcctactagaataaaagattttaattttactaagtttatttattgttatcactttatgtacttttaggaggaattcttacaaatggttagaaaaagatacagcacaaaattattttacaaatattacatgcagtggattcgcttatacaaagaagacgcaattcgccccgtcactctagagaagtattatttaacttaccgaatgcttcgaaaattggcacctgacctgcatctaaacgaattagaccgacgtacttatcaagcaattctgaacaagtatgcccttactcatgagcgcaaaaccgtaatggactttcatcaccatcttaaagctagtctagtcgatgctgtagatgatggaattattgaacgtgatccttctaggcgagtaattattaaaggtcagaaacaatcatccaagaagacgaaatttttaagtttatatcagctccaacaattacttaggcaacttgatcttggcccaaaaattagttgggattggtttatcttattggtttcaaagacagggcttaggtatgcagaagcgctagctttaacacccaaagactttaactttcaaaaatcggaaataacaatcaataaatcttgggactataagagtaaagtaggccattttcagcccacaaaaaacaaatcatctaatcgtgtcgttatcattgattggcgcactgcaaatcaatttaaacctttaatagctgaattagatcctgatcaaccaatctttgttccagagcacaaacgtgtttttaactcaactattaattccaaacttaatcagtattgtcgccgggcagggattccagttatatcaatacacggattaagacatactcatgcatccctattactatttgaaggagtctctatcgcaagcgtagctaaacgtcttggtcatgcaaatacgataacaactcaacaaacataccttcatatcatccaagaacttgaaaataaagataatgacaaagtaatgcaacatttatcaaaacttgattcataaatcgaataggagataactgattagttcaattatcaacctctcatatcaccgtacgtacggttccgtatacggcggttcgacaacttaatcacattgaattgactggagcgtcttggacatattcataagtccgagttgttccagttttctattagttagagaatagctcagggtcttagtgtatactttcggttttccaaaactatcctcgacaagcggtcagcttgttgttctgttttctgcgattgtcgcacctgattacaccttcgatataagttacaagttactgtcgttcagtccatcatctgattactcaaactactatgacctcggctgactcctgacttactcaacgatacatcactgcaccgcttgcttctgtggaattttatcttattcctcttgtcggaaacgtgtaggccagatctacccggataaggatattaactttcgtcccatgtcaccgttagctttactaagagtagcttcgagaagtattggacttcagcttgtttcgcaaccttatccagttacccacagccttatagctacttcttgttcattggtgcaatacttttccttagacttccttctcacgacggacacccttgtcctcagctcatggttccagctactacggcccatggtgggctttcaccgcctagctaatacccatgcctggcgtacaaaaaaagaggaactacaaatatgtagctcctctttctcgtaggaaagggggatactccctcctacaatcaacttgtcatcgcattagaacaacaagcgaaatccaattgtcatctatcacataattggtctacttatgatggatgacaaagatagtataacataaagataagaaatatacagcttaatcctttatataacaagcgtttatcttattccataactggaactaaatttttttaccgttgttcaaatattcgcttcagtttggctaaaacacttagtttaggcttagttacaacagcactttcatcccctttttcatcatagatagccagtttcttttttaagagcttgttttccagttttagtttgtcattatctacctgcaagtacttataattctgatatagatcatttgaaattgtaactgttccttgatttttcttatcctggttaatctggtttttctctggatgaaaaaaatctactggagatacgctttttttgttagatagatagttgcgcagttcttctacttcactaatcaatgtcacaacttggggatacgtcatttctactgtctgtatattttttttagtattaatcaccatcaaaattttattaaagtccgattcaacctgaaatgatataggcgtaatagtactattcattttgtaattcactccctttttattcacaagataaatatcagttgttcttgcatcccttcattggcattcatcttttgttttttatttcaatatgattatgacaccaatattaagataattacctgaataccaacaatcattatgattattgaccatgctattgctgcctgccacgcttctttaaggtcgccatcaattttatcctctatttgattacgctgttttgtttccgttaaggtatttcttgctaactcactcatcattgcttcaatttgttgggtctttatctgcttatccaatgaaattttaattaatggttttccacgtaagaattcccaaccataccccaaagtacccaaatacttggaatactctaacagtctttggaaaatcttgctttttttccgttggtaaggatatatatacgtatccccctagaattaacataatgaatagcatgacggctgatagtaacctaactttaacgacagtattaaaatttgcgggtccaaagtccttattaataatttcatcagtaagaatggtgcctttttttattatttagctagaataattggtgctaaagcatttacttttaaatattttccttcaaatttaataactttatcatatcttgtactcatcataatcttcctttctttacaagacgtaactaataattactcataatctttttgtaccgctcatagaacattcccggcgcaatttctaatggcacatcaatatcggctccatcaatatcatttaatagtccattcagattgatactttgagaagcaagtctagcaatctctctatcttttaaattaagttgtagtgcctgtttcttcatttcagctcgttgtatattatgaagacaattccatctaattgaagcaactgaattcatatatttaactaggccagttagtttttcacccatcaatctaacagaaggcttctgcattgttaagtcaattaatgctgtatcagttgaatccaagtctgacaatatttcagcatttgctagtaataaaccatattttttagagaagaatcgcctctgaactttatatactttacatttagaattgaaacgattctgcttaatatcccaataattattgttcttgtaccaatgaaggtaaacttcaaatccttgccataaatttgtatcaagatctatttcttgattacgacttcctacaattagttccaaatcagtgtttttataccattgtttaaatttttctggagtaatcatatttatattatttcctttaaaatattgtattttgccacacagatttaagtaagaaacacgttactgtattcttatcttatgacacagtattaagctaatcaccaggatgccaatgatcattatgaatattgaccatgctattgctgcctgccacgcctctttaaggtcgtcatcgattttatcttctatttgtttattactttgttgggtcgtcatctgcttacccagtgatgttttaattagcggtttcccaattaaaaatcttattacacaagtaacaattccaaaccctaccccaatgtatccaagtacttggaaggatttagcagtctttggaagatctgcttttattccgttgataagtatatataaggcccaccctagaattaacatataaaatagcatgactgttgatagtaaccgctctttaatttttctattcttcatttttactcaccacgcgtttagttcctaaaactacatatctctctttctgtttgtaagatgtaattgcaatatagataatctttcgtactaatagtctgccaatatattgaccatttttatattcatgattttacaacatcttgacactttcttagagttttagaatatattaatgaactacttcctgttttagaaggaatggaaattgctaaagtaattaccaataattttcttcctctttgaattttagcttgtatttgacagatggctgatattgttgaagtacttcgcctaatcttcttgccttatttttatcataaaatgtttcttccaatcgccgtcttctttttttctgtagcttattttggaataacttcttaaacattcttatcacctcatctacattttcagaaaagcaaaacattcttattcgttattaaacactggcgaactagggggtgttggtactctcatctctgaatcaactattgcatttccattgctgtagtcaaaaatatatcctggctgtacattgaaaatataaacgttaaaatccaaggatctgtcagttgagactgcctgtaggtttacccctcgcgccatcaactcattaccacgaaatataggagtaacctgatatataactttatggccattctcaattgcttttcgtaccttagcttcgtagattgtctgtaatttctgattactaaaagctgtttgtgtgaacagattcttaggattattttggtctcctgaagtactattagggtcataattaccatcttgattaataccggcagatatcgaataagcaatcatatggccccgattatagatctgaacccttccatgattattatgccaagctgttggatcaactgtttgtcgtactcgaagctcctcatttgctcgattatgttcttctaggaatccggtgttaggggatgatgttctattcaatttatccaaagcagaatagataaccttgttggaattccaagaattaggattcaaagtggacctaccattgtttacttgaattattgcagattgtcctgattgaaaatttttggtagctaattcatcgatttgcgtttgtgtaatcccaccgtaatcattagttgcagttgaactcaaatttgttgactgtccactatcccgaggatttaatgctgaattattgctttgttcactaaccaaagaagatgaattacgactattaggttgagttaatggattcggccgattaacacatcctgttaaaagaacaccaagaactgctataggttctaaaattttccataaatgtgtccttttcatttttcatcgctcttcccttttgcgaacaacgatggcgaaaaatgaaataggtcagctaatgcgttaagttcctgtgtagttggtcgtacctttaaactttcaatctcttctacacgattagcattaactaatccatctgttttgtcttgaatatccctataactgtactgttcatgctgcctcattagttttaaattaagcgcaaatatatttctcttattcacttattccacctcactttaaaattaactttatcatcatgacggggtttatcggcaattacttaataatttcccattttcacattttttgagcagaattcttttcatcttccttaccccctacaatcaaaatgattacaagttaggaggaataataattatggcaaagcatagttggctacacttttttaaaattcaaccaaaggatggtaataagagtactaagaataacaaaaaagaaattaaagctgaaaaaaaagaaaaacaatctaataaagcagtgaatgagcaagtacaatcatctacttctcaatcacaacagagttctgatcagcagcctaaaatcgatgtaatacaaaatgaagtacctgcatcccctaatactggtgttattttagatgcctctgagcaaccacaagacacatcaacatcaagtaaagaaacgagattaaaaaagaaggagcaatttaatgctccttccgttctggctaaaccaatcattatccaatttttatatcaaaagaaaaaaattgctaacgattatatttttactggcgaaattggtcaagctttagaccttactaaaattcctgctgttactggttatgatttaccagatgctaacaaattaaattactctgttacagatcatacgcaggtagtcccaattgagatgaggccacaacttattcattatcgactagttccagtaaccgaagatcgagaagttattgataagaaatacataaaatctctcaatggtcaacctggtgagtcaattgtctttagcaactttccacagattcctgggtatcaagcatataccactcgaatttatattgttcccgataaatcggatgatcttcagattacttatgcacctgtacaacagtctttgacggtagtctttatcactacttcaggagtaactttaggagaacaaactcttcacggcaagactggcgatccttatcgcattagcactaaagaacatcatttcgaaggatataccctaagtaaagatgatctaccgactaatcttgaaggtaattttgaaccagggaatcagatcgtaacgcttaaatacaaaccagttgagtctggtgtaacaatttcttttattgatgaacgaggtaacgctattcataaaccacttactttccctggcgcttacggtgagtcctatcacttaaataatttaccacctattgatgggtataaattattttcagatccaacactgctaattggtaaatttgatgttaaaatgcaacaaattgtactcaagtatcagcgtgcagaacaaaaagttaaagttcgtttctggtttgacgaaaagcatacagttagtgcaggagaagataaaatccttaccggtctaacagatgactcttataaaatgcaagtacccgttcttgatggttatcaccctagtacacagatcattagtggtcggtttaaggtttttagcaaaaaaatttttgatattgtctaccagccaattaaaacagtcattaaactatcactccaggatgagggaggccgacaacttcctaatgttcaatctttgacaaagactggagtctacggtgaaagttatacctttgatctgccggatatttcaggttatgtacggccacaagaaaaaattagcggcaaattttatcgcccccaagataccattatcgttaattatcgtccaaaacaagcaacattaacaattaactatcttgattctcgtacaaaaaagccaattccaaattacaacagcgaaacaattaatggcctagttggtactgcttattcaattgagccaaaaatgatcaatgggttcaaactaactgaactacctaaagaggcttctggcgtttataaacgggctcaagatgttgttaatttcctttaccaccctaatccggcgaaaatcatcattcaccaagtcgatcaggctaataacaccttatttgagccttttgagctcaagggttactttggtgatccatacaacattaaaccagacgaactaaagggctatgcatttgaaagctccagcgataagctttctggcgtttatcctgaaacacctaaagatatctacctctattacaaagcagaagtgatttcattcacccttgctcctgccaatcaaatggataaagttattgataaaaaatacaacttaaccatctccggaatggttggtcaacagttttctaacggacttccagaaattcctgggtattcacctaagaatgctaacagaaatatcggtgggactataaaatccgctatggctgataagattctcttaattgagtatgagcctgatgatgcacaagcaattattcactttgcttgtgctggtggacctcgtgatggatcaacaccgtttgaagactaccctcttaacggcaaggtggctgaacaattcaaatatactcttccagaaattcctgggtatcacacaaatactcctgtccttacaggtacatttactcccgaaacaattgatcttaatgtagtttatgaagttaaccaaatcacatacagcattcattacgtcactgatcaaggccaagagattttcacaactgcaccaacaaaggcttcttatggacaaacattagatgttatgccaagcctaccagaaggttatcacttaccttctggatccagtaatgaaattgtgctgaataataactccgattacaatattgtaattagtccagacagtatcattgctgaagtaatcgctaaaactaaagatggtaaagagcttaactatcgtcgacaaatcaatggtttctaccatcaacctcaaactttcccagcgccacatctcaatggttatcaacctgttgatgggaatgagttgacgattaattttgaattaggtcaaaaagaaattccggttatttatgagccagaaaaacggtctattactgttcgttacattgatacacaaggtaataatctctcagatccaactgttatctcaggctacttcgatgaaccttataagattgaagccaagaagtttgctggatttgttgttattaatcaagatagcactagaactggtaaatttggtctcaataacagcgatacaaccttcatctaccgcgctggtagcgatgaaattaacccagctattactccattagacgatatgctcatcaacaaggaagttgatgctgacactaattatcaagcagtagctgaagataattcaaataactcagataatacagccaatcaaaatacaacgattgacaccccagataacttattttctgtaaatcagggaagcaatgtaggaatggatgaccttattgatccgacttctgctaattccactgatccaaatgggactattagccgtattattcatggtagaaattaggtcgtgattacaatgcacttaatgtcaattaacggaagagagtttaattgtagctcattagcaagacactacaatcttccatacaacactgtcttgaaactatatcgtcaaggtttccgtaacgaagaactaattgaagaatcaaagagaatacaacagttacacgggccagtcattgtgaatggaaaatggtatccttctcgcaatgctgctgcaaaagcactaaaagtaccgaaaacaacattttatcgaaaacacaaatcataattaaaaagcggaaagaaatataagtctttccgctttttgtgttgctgtatcaaaaacggaagaaaattttagttccatttatgaaatgtcatctatgtatgccgcatacgcatttgcattactttttactggttctttttttcctttgcttaactattttctctattttaaagtactacaacctacctttttgtttttcctttaatatttgaatcaaatcttatggaggaaataaagcgtgaaaacaattagatctgcattagcaaagcacaaaattatcgcaatttcagtcattagttttttcctgctaattgtcttaattgtcattattattggtggcggtactcaagattgtagtaatggagacagtggcggagctagtggtaactggcaatggccatttgacggagttaaagatcctcctcaatcacttgatggaggacaatttggtgatagtgccgcctcctcttccgttcgcggtcactcatttcatgatggttttgactggtcctttggacttaacggggttcattctggatcaactgtaaaggctgttcacgatgggaccgttacgaaggttggctatgcagcgggactcgatacatacgtatgggttcactcagatgatggctacaacgaagtttaccaagaaaccttttcaccaagcgacgtaaaagtaaagcaaggtgatcatgttaatgctggtgatactatcggtactgcacatcttaatggtcatatgcacttagggattactaaagaaagtgatttcggtaaagctgagtctaaagccttcaccaacgatggaacatggttggatcccgttaaaactatcgaagatggtatgaagagtggcggtggcaactcaagcaacagttctggtagcggcggctccggcggtggcgattggacgcaaaaaggatcccaaggttataaaaatgcccaagcgatctttgatactacaactaaaactgatgggttttctggtgctggtggagcaggtgcagttggaaatggtatcggtgaatcaggattacgtactgacgtagttaacgcttatggttatgggggtcttttccaatggtctgcttctcgcttctctggctccggtggtggtcatgttaaggttggtgataaatcaacgtacacattagagaatgaattagctactatgcaatcagaacttaatggagcttacaagaaagtaaagaactctgttggacgtgctacagatgttcatacggcaacttataactggtttatcgattacgaagggatggctggcaacgaaaatcaatacggtacacaacgggatcctggggctcaatgggcttataaagaattcggtggagctaatatcaaagctaatgactccctgctaggtgccgctgctaatggtgctgccataggtggtgctggtagtgctacagagcaagattgtgatagtagtagtactgatgctggttctgccgatggcaatattgttgacgttgctaaaagtctccttggctatttccactatggtctagtacacggtgaatcaaacattggctcggttgatcatcccaacaaaaatggagttacagactgttctggatttgtatggcttacgcttaccaaggctggttacaaaacacctgctaacatgggatggttcaccggtagtatggctgctgatgcaaaaggttcccaccagtggttacaacaaattgatccgaaggacgcaaaagctggtgatattatcatctgtaatattggcaatggtgctggtagtgctggacatacagctattcttgaagaagcttggcatggggccgacactaaaattatccaagaaggtggtactggtggtagcggtggtgtaaatgagtcaaccgttggcccatcatttagctatctctttaccaacggagaaaccgttcttgctcgaccaatcaagaaataatgttaagggggatcataatgcattcgaattttaaaaaatactttaaatcacagtttaaaaaagttctctatctttttatcggggttgctattcttttcatcttagtacctgttggtttatggggataccaacgttatcaagataatcataccaagccacaggtaacagatgaaaatggacatccccaaactactattcttcataaaaatcaaactccaaatggtaaaaagagaaaaaaagttcccattaaatctgtttcagaaaaagcagcaacgaagaacgttaaaaatagtattcaaataggactcaaaattatctctgataataaaatcacagctggtcaaaatataaatatctcaaatctcaataaaaaagatactaaacagctctatcgatcatttcaaaacgggagcgtagtacaacagtttaatgatatcgttaactactctactcctaaggggtatgtacagtggggagacgctggatctaagtctacagatacttcaataaaaactccgaaaccaggggataaatatgttcttgatggaggcgatattcaccttacatcttcaaacgttgagaattactttttcaaagtcaatcttacttatcatgccggagatcaaccacagagaacaattccattaaaattaaccgttaatcgaattgccggtcagatcactaatgtaaaaagaattggagaagttaagattactaactaaaatccacaaaaatataatatataataaataacatataatatattatttattataaaaagaagggatccttttgaaacatagaaaagaacgatattatattgctaaaaatggtactaaaagtaagctagatccaacaaaaatccttttattcctaataggattgttaattttgagtattctcgcgtgtctagttgttaatgtgggaaacgctagaaaaaactattatactcagaaagcagaattggacagccttcgcgataaacagcataatttaaaagctgtcggtgataaaatcaccgaaggtaagtttaatctcgttgctaatgaacaagaactgggaaaaaattaccaggaattaatccaaaatgcatatggtaattgccataatattaaagacctacagaatctaaagccacagataattaaatatcttggtcaaagtggatatcggcaggtgcatgaacagattgtcactactagtgacggcaaacaggttcttattccttctaacaatgaggaagtacatgtaggtttttctaattacgactcatcaaataacaccattgatgttaccgtctgttcgatttataacgctaaaagttatggagtacagggaaataataacaaaatgactagaactattatttacatcaacactgtctatagttttgcaaccaaaagtgccaaccaaaccagtatacaaactgctagtctaggtactaataaatgatcggaggaaagaaacatgcacgagtatatctggcataaaaatgacaaacgttggctagcgattttgacagtagccgttgttagctgttggcttatactagctattaaatctagtattgctagcaattacaatcgcaagacggaacttatagcccagcaaaatttagtactcaaacaacaaatcaagcaaaagcaaaatagtctaaattaccaaatgcaaaaaaaggctgttaatagttccaatttagagattcgtaatagcgtacgtacaattatcggcactaatgaagcaattaatatttctaataaagcctttactacgctcaatacctacagcaatgggaaacaatatcgtaacaatcaaaaaacagtaaaaccatattttgatactaatacattaaaaaatcagcaactattcaagaaagataaagatgtaactggatactcctatattgatgcctcaaaccttaaatcaaaaagtgtttctgttgagacctctgctggagtcattaacaatgatcatttaccgttaattattaaaaccatctttaatcagaatcaatttaataaagatcatggtcaaactcaactggttatgatggcagattacaactataagacaaagaaaatcggtaatgtaaaattcattggaattttatatcaaggagcaatcgataattaattcccctcagaagctactctaagctaattcatttcatttttcgataatttccacgtaaaccaaaataagctctcagaaacgttctgagagcttattttagttatttttaaaagaattacgattttttatacgttgttttagcttatcaacatcaatctcaccagagtttttatatgcatttttataccattttacctcctcagagtcttcaccaaattgattaattaacaatttaagagccccctcagtatcagtaccgatatctttttcattaattccatgttccatcaaatagttgctaaccgttagccatattggttttttctcttctatgcgatgatgatcaccccttttatgactcccacttgaagattttctcgttttagggtgctttcgtttctcaatataactataaatagctttagatagatatttgacaatgtgatccggcttttttttcatattttgtgcaacataatgaagatgattatctagctcattaatttgcgcattctttagaaactcatcataaatcggatataacgtaccaaccaaagtaccacggtacttttcatctgtagtaactttattcatgtctagaaggccagaaccaataagtaattgcgaataccggttttgcaagaagtcagtcaatgatattttaaccgtctttggcttggtatcccctactaaccgctctacatccttacgcataatatgaaattttaacgctgtcactctacggccttgcttaatacgatcataagtaatgttgtactttgtatatttcgttatctctttagtaattggatcaaggacatagcgccttacgtcatagaaatcagtatactttttttcagttcctgttagtttacgtaactcatcaacagtaatttccggattagcatacttatcaatctgtgccatacgtcgcgtcccactattaacataatactcgtactgccgataattcatcgtaaaccaccgatacattgataccgcgtacttatttttcaaatgaagaatatcgtttaactgatattgtgtaaaattttctttcaagtcagtgataaatggaaggatttctggtgcaaacttaatagttgcataatccgaactgtagttgttgtcagcgtagtagattggtgtaattccaatatcgtgaacttcaccattacgttctgtcgtaaattcaaaatttgaattcttacgcaaggtattaagagccttggacagttgttgatttctacttgtccccttaatacccaacgcattataaatctgttttttattaatatggacttcatgtgaaggctctttttgtcgcgaatccattgcactaactgcaatttcaaacaattttaacgatagactggtcatgtttgcagtgcttttaattagatcgttatgctcagagacaatacgattatccaatttattaacaaccggaataacttccgccttcttttcgtcttttttaggcatattctttcctcaaattcttttaatcaatcgaattcattatatcacattaccggaagatatatagtttttttccgccacttcttggcctagctaaaattttcttccggttttaggtttagaatcatcaatttgctaaattttcttccgcagtttgtaatataccctaaattttcttccggtttttcttaaaatattagtaattctcaaaatcaaaaaaatagtgatgataatgttcatttaaattcacgctaaatttctttccgcttttttgctaaattttcttccggtttttcttttaactacaattacggaaggaaattttcttccggttttaaaatttccttccggttttcgctaaattttcttccggttcaaataaattttcttccggttcaaataaattcttttccggttttaatggacttaaatcccgctataccaaggttatagaaagttacaaactctttaaactctttaaactctttaaacttttgatatataaggtaccacacccaataatcaattttttaagaatataagtgacttacttttacatacttttctcaattaagataacaatgaaagctgaggtaaaggaaatgcaggatttatcatccaccataatactcacattaacttatctgttcttagttttagcaattccggttagtgcagtatttggattaacttatattaaccgaaatactaagcaattattagtaaactatttcggtgaacgatctcaaatatactgtggtggactaggcataattatacatgaattaagtcattttcttattgctttgctctttggccaccaaattactagtttcaaattattaataatgccctggaatctgaatgaagaagatgggtcccttgggtatgttaatcattcatgggataacaatagcttatatcagagtattggtaatgtatttatcggtactgctccgatttggggttgtactggagcattaattctaactactaaatattttgctaattcgctatatcagtcatttactagtgccattgaaagttacgggacaattagttcacttaaactcaatgttctacaactatttactcacctaacccttggtccgtttacttttcaaaacattattatgttattaatctgggggattctttcggtaaacattacagtaggaggtttcgatttaagtaacgctgatttaaaaggttcattttcatcgtttattttaacgtatgctattttgacagtaattctctttattttagtatattgtggcttttcgatgcttattagttattggttatatcggggatgcgcttggttctccttgataatgcttatctcctttctatggtcattattttctaatctcatcttacgcctcatattatttattcaagaaaaattcgggagtgaagatatttgaatactgcagatatattaattaattgcacattcattgctttagcagtcaatgagttctttatgctagaaataattattaatgcattacttcaacacagggatcttaatcgatgggtaaccactaattggaaattgcctcttttagttagtttcttgtttgcaagttgcgctcttatattcattcaaacaagcaggcatgataattatatttatttggtaagtcttttctgtaccattgtacaaactttactaatgctagactaccatcgcatgctaaagcgatatattaccagttcttggtatttactatcaacgaaaattaactggattattggtgtcatctgcatcttattaattatcacctgtattttatatggattaattgtaatagatttcaattagggaggtctcctatggcacttatgagtcgaaataataatattcacaaagaagaatttatggaagattatcggcatgatatttttatcatgctcctttcgatgggagttgatcgatcagcagcaattgcattaattaaaactagtaaaaatgatattgaaatatgggcaggcagtcgtccggcaactgggagcattgttactccacagatggctgcaagaatgatcgtgcgtgcatcaaatcttaatatagaaagtggtctctaaataaaaagctatatttttctcgttttcccctccccttttggtatatccttagagcaagaattatttgatactgtgaggaggaagcaattatgaacgaagcagtagagaaatacttggctggttatcacccaattacggctagcccacgtaaaagaatttatactagtcgaattgcttgtaaacgagatgaaaaagaaattaaatttatgaaggattacgctaaaaagcatgaacagccagttatctttcatcatgaagaggacacttatctatactaaaaataaaagagatgcatctaacctaatagttagttgcatctctttttaagtttgaaatttaatgagaggaatgcgttaccatgtttgataatgtaaaagaaaaaattgataaacgttttgaagcctacattgatcaactaaatgagtcgtcaattgatgatctacttccccgctttgagaagatagtaaaaatattatgggctatcccaatatttctatggagtttgtgtctaattttaactatctttccgtttcataccttgaatcatagtttcttgttaatttggattggtggagtggcagggatgatacttagttttttagcaaatcgaatgttaatgaatttgacaacgcggagaactgatattgatcaggatcatcgggtagaagaattactaggccaaaagaagacgatggattaccaagtagcaatcacttttggtggcctaactgcccttccatttgtttatacagctattccttatacccagttcttgttggataatccgactattcctggtgtaaatcggcaaatggtagaacttattgctggcccaggtctttttaataatattatatggactttagctcctattctttttactgtttatatgctctctcggcttagaaaaagtgagatggaacatcaaaaagaggtagaaacatggatgtctaaatatgagtaccataatgttaaactccataaagttctcaatggtgatgaatctagtgatcatgagcctaatattgttcttggaacatctcttgaaacgggtgatttcgttgttcaaaatagttctactaggagacaaaacactgtagcatatggaccaattggctgtggtaaaacatcacggtttttcttgcctcagattagacaagatatagatagttatctacagtacattcggtattataaaaaagcttctcaacaagaggggtggatgaaagcctatggggatgcgactcactatcttaatggctttaatgttatcgacccgacaaatgatttatgcaaggaagtttatacattatgtatgaagctcggtgtgcctagagataaggtgatttggctagacccagaaaatccacgaacccctggactgaatttacttcgaggacctgttgagaaagctgcagaaaatgttacgaatattattgcagggttaacctctagtaataatgatttcttcaaacaatctgagcgaacacacctcaagaatatgatttatctcttaaagttaacgtcagttatggaagacaaaatagctagctttggtgatttaattgagatgtataacgatattgaattagtttgggataagatggaaattcttgatgagtactgttctgaattaaaacagcgtgctgaacaagcaaggcaacaatatgatgatgataatagtgacgataataaaattgcttttgaagaactagatgataagtatgcagttgcttggcaaacatctcaatggtttcacaagaatatccaagaagttacagtcggtaagaatgtccgtctctacgcttcaggaccccatcaaggtaaaccaatgcattacgatgcgcaagacgaatttgtccatggcctcttaaatcagctaggtgatatttctaaaaatatcccaattcgtcgggtcctttttcgagattctggagattttaatctcgatgatttcttgtataacggtgggattctcctttgtaatacagctaaagcggttgttggagatcagctagctgaaactttaggacaaatctacaccttatcatttcaagcagctacttatcgtcgagatcctaattgtcctcctctgcatccactatatgctgatgagtttccagactatctttctgaatcgttttcgggttttgcttcacaagctcgtaagtacaatgtacctatagaaatagttgcacaatctcctgctcagcttgcgtataaatatggtgatgattatttcaaaacattaatgtctgttatgctcacgcgggttacgtttggtgatttaggggcgaatgatgcagaggaattatctccctacttcggtgaacatgaagagactacagaatctttgaataatcaagaggtcgatttagccgcggatcaagatagtaaccgtcaaatgattagtgctcgtcgagaactggttcctaatataactgcaagtgagattatggggctagagcgatttacaatggcggttagaacgccaggtcaacatggttctgatatgtttaatcgggtacggactaaaagagtttcagatgagcaattaaacgatgatccatacaaatttgatatgactaacgatgaagaccgggagtcatatgaatatatgctagaacatgaagttcatgataatccagactttgacgaaattgataaatcaattatgaaagaaataaaaaagcgtccaaaagaggagaacggatcaactactacatcaatcaataatgaaagtaatagtaatgactcgacgtattttgatatcgatgatgccgatgatgaaatcagtcgctcactcgtcaataacggtggacataagactgttaaggatataaaacaaaaaaatgatctaggattgcttagaagtaataagaagagttctgagggtgaattaggacatgatgagtttcctcaccctaatatcaaatttgttgattttgatgccgatgatgatatcagtgtaccgagtcataaagataagattaatgaaagggatgaaaagtgatgatgtacttagatgcttataacaatcttattgttgataaagaagatcgatttattatggaacaggatcgcaagaaacgatatgagtctagtggagatgagttaagaaaacaagcacttaaagattttgaaaaagattggaaaaagattcttaataatgtaactattaatgattatgaaaaattaacagatttaagaaagttaagaaaggaaagatatcccctactcaaagctttatacccaagtagtgttgatacagtactggataaaacaatcgaccggattattgaaaaacagctagtaaaatttaaaaagaaccacagtattgtacatggtaatgatgattacattaaaatcagacagaaaacaaaagaaacaggaaagattaatgacataagtacagaattaaaaaacttagttaataaaatggatttttataaataatatataataaataacatgtaatatattatttattatatattacatgttttaagaaagtgtggatatgatatggctcttgaaacggttattttcgctcccaaaatactaaatagatttgataatcaacttatagcaacactatttaataatgatgagtctgaagaaaaaattattgtttcttctcggacctgttatcttcaagaaaaggggattatcaacctcggaaataatgaacaattattaaaaaaaatagttatacaatttcccagtaagcttgagaatctcatcaaaagctatctgtctttgaatattagtaagcgttatgctctgtctttccagaatctaaaagcaacaattctgttgatagaggaaattgctaattcacaaggatttaaacaagataatgctcctcttcacgctctagcctttttatgtagtaaatcgcaaaaagcgttactcacatttataagaggttatcaagttgaaggaaataataaggaatatctcaatgcttatctaggagaaattgttcatcatgttgattcttttcaaaatattttagaatttttgtggaaaatacatggagtaaattatgtaagagaagataagcaaataccattcagtgataaagagattgtgtttattaatgcttcaaaaatagatgataatttttattatcaagtatatcttttattttttagcaaacaaaaaagtcagattttttttgatcaacatgtaaatgaagaatataggtctcgtttttacaatacgaaaggtaaaatttacattaatagtgggatcttagactctcagatagatatcaactacgatctaaagaatttaagcgatatttactactcattggagcttagtgatcctgcatttttattacgtttgttttctatgacaaaattaaaaaagattcttgatcttacatttaacgatattaaattagctttattcacaaaaccaatatatatgttaaaagatagatatatacgaattcgactgcaagaaaacgtagttgaaataataaaagttaaggatggaaaattaatttctaattctattagccttatagaattttttaacagcttatcgaaaaaagaatatcatcaaaccaaggatgatagggtaatagacaatggaaatgaagctatgacaggtgaatttggtgattacggggcatcagctccagagttaaatggagacggttggtataatggttaagatttgacagcaaataattatttattatatattatatatgataaataatatgttacatattatttatcaacaaaggcaatacactttaagtttttcgtatagaacggtctacactacacgaaaaggattaacttaacgtattagaaagcgaaatccagttgtaagtcacaaagggtctacaattaaattagctgcaagtaaaatccaatgtgtattgtttttttgaaaagaaatatttctttcaaaggagcatctagctaggtactccttcttttttacggttaatcttatcgaatagtaccttattatatcttttagatattaaatagtatatatttgttattaattagtttctttttgataacaaatatattaaatatataaaagccgtgttatacaaatgatagcaattattatcatttgtataacacggctttgttttagtcagtagtatattctattattttggaattacaggtaaaaattcaatatagtattgagttaattgattattgttgaaaacaaatgaacttaattgtttaaaacagtctgctaactttttaatatcggtatctttatatacaaaagtataattatttttaatcaagtattgttttactttttcactatcgtcagcggaaagcatttttggcgaagcaatttgcatttgagttccatctctaaacattaatataacatctaaattttcaccgatagttgcaaaacctaataaatgaaagaacattgaatcaagtggaatataactttcagatccgtcagttaggtctataacatttatctctttaattggaagtttatcgattgcagctcttagttttacatgaacttgtgttttttcaacaaaagtagctgcatttgcggctttctgaatcttattgtaaacatcttcatttttattttcttctaactttttttcgactggtttatgatgcataattgtgtctttgatatctggcatttgttctgtcttctccttttttaacttcatttgtgcggcatttttttcttcagcttgtactgtatgctgtatcctgaaagttttattcggtacagatacctctgagtcagtttttttattaatatctctctgctgaattggagttggttcaccagttatgacttccaaagttggatgcggctttgtttttttggataatctttcggagcccagatttgtgtctaaattgatttctcctactttactgttcatattaaccttttcaatctttggactattttttttattatgtcttgtcgacgctctgccattatttatttgggatgatactatcgtcttatccttgaccgattgagatttggatattaggttgttttctttagaatgattgttgctattgttaaaattctgaagtgttttctcttttttaatatgttttttcttttcttcagatgaattatagcgagtaacaacaaggtgttcttctttcggtttgggcatgtggttgtgaatcaaatcaaataaattactatccgcatacttatttatctttgatcgggatattactgccataattgccctgccctcctttctttctatcgctatcatagcagtttgatttcttgattttcccattacttaaatagtttaaaaattgtattttttcttgcttataatttaagtgaatattaaagaaagggttgatcacagatgaattcaccaatacatcttattgctgcacatgatggaggcaatggatatatgaaggatgctatagatgggaagcgatatatttttccatctataatgtccactgttattgataatgcaaataataaaatcaataaaaaagataagaatgctatttctagtttgcttaataattttcaagaaaatatggacgttacactacaaagtaatgggattaaaaaaaatggtagatatcttgttggaaatagtgctaatacgagcaataacatagttttaggctttaatgtaaatagcaatgagggtaagtcaagttcagatataagtattatctgtttactgacgttacttgcttatactagcttaaataaattttattcaaaaaatggagaattacctgagaatttaactgttgaagtcgataaaatggttaccgcacttcctatcgatgaaataaagatacccggagaacgtgaaaaatatataaatcgttttctccaccaacatatagttactattaataactttagtactccaattcaatgtgtaattaactttaataaagttgatgttcagccagaaggtgttattggtcaatatggattaataggtgacccccataacataaataattaccgtaacgatgatatttttaatgatttaaagaaaaaatacggatttaaaaaatttactggtgagaatatcgagaaaataggaccagttatttctattgatattggtgatgggactattgacttttcagttttgaacggtgtttctccggtaccacgaattaattcaagtgttttacttggtgttggaaatatagtggaagaagcagttatgaatttacgacaaaagtaccctacctacgggcaacttaatcgacaaaatttcatgaaaattgcattacgtggtggcgataaagaaagtgctgcctttttatcatttattgataagcctatcatcctgttggaacagcagattgaggagaaagtaaaatcaatatttgctaaattaagtaatcaagtaggactaattgtgattagtggcggtggatccccattagtaaagaaatattatgaaaaagattttgacaatataattaatacattgatgccatttggagctgcagcaactttatgggttccagctagatactctcaattcctaaatttagatggattagagtttagattaaaccatatgtagaggtaacaaaatagaaattaatgaggctaactaactcatattctgaaagaatatctttctacatagtcctatattttattagtagcaactataagatgactattaaaattgctattatgctcatgttatttatgaaaatggtaagaatattgattatctataaggaagcccagaaaggacaagcatgcgaaaaagcataaagatagatttaaatccaaatgaccctgtagataagctaatcaataagtatttagacagtcaaagaaatattagtcatactactaaattgcttttattaaaagcttactatcaatttggagaaaaagatttacaaaccaagattaacgaaaaggctatgcgaggagaagtcttcgagtttagtaattcgaagaaagaaactaaaaatgaagaccaggatttaaaaatgaacgagagtgatcagaaaaatgggcctgattttggcacattcttcgataataaagaaaactttgatgatctctaaggcgttcttactattgctttaggaacgctttttttttgaaattgttttttctcatttgaaaaaagagtacaataatttgtgatatataatatattatatatcacaaaaaaatatatgtagtgtagaccactctgcgataaaagaaggtgattttaatgtccacccttatgttctataacaacaagggcggcgtgtgactgagttgggaaaacaaccatttcagttatggcagctgattatttttctaaaagaaagaaaaaggtattactagttgacttagatcaacaatcttcagcaactctttttctgaaactaaatcataagtttgaaccagaaatgcctttctttcaatctatattaaatggtgatttaagtacaagtttatgtcatgtagccgaaaatcttgatattattcctggcgacgttgggatgacccggtttgatgaattcgcatttaaattatcctcgagggatcgttttaatgttttagaaaagctacttaaaccttttaaagataaatatgattatattatccttgatgtacctccttcgcgagggccaattgtatcaaatgctgttttagctactgattatgttgtgcttgtagtgcaagcacagcgtggaagttatgatatgtttttgaagtcaatcggttatttgagtgaattacaacaggagtatagctctaaacatatcttaattggaattgctctctatctggtatcaaaaggctctgttacagagaaaaagatatccaaagagattaaagataaatttaatggtatattagaccaccaaatttattatagtgagcgtgtaaaaacctggtcagataagggaataacgcactcaaataatattaatgataaacacacacataaaatgtacgatgacttttttgaggaaattgtaaagagaatcgaggcgtaatacgtatggcaaaagattacctattcgatgctgcgaaaagtgctgaacaaatgatggggaaggacttaaaaaaagaaaatccttataaaaagtctagagaaaagtcgagagcagcacaaattcgagtagataaattaaagatgatcaaatttattagttcaatgactggccgtaatattatagatattacagatgatttacttcaaattggacttaatgatcctagatataagaagtatcaaaagatcatgagtcaaattgatgatttaaagaataattaacaaaaacatataatagataataaattatatattatatataatttattatctattttttgtttaaatatgttatcatttagttagcaaaaagtatatttaagtattaataagatttaatattaaatcttattaatactataagttattatttgctatacaaatgttataaaaagtattaaaatgatagatgtagtttacaattaaattggaggaattcttatggttgaatcaatttcaaaatttgctaatgacttaggctatggtgctgttaagtataaaataagcaaaactgacaacaagactgatggagcgttgaaagagccagataaaatttcgtctgtaattgctatcgagcgtgaacaggatattccaaatcctattgaatttgatgataatgatcaaaaagatcagtatatgaataattttcttgatcatatggatgttactatatctagctcttcgattaaaacgcagggacgttttctagttggaaaagctgcaatagaaagtagattgcctctagaacaatttgatattaatgatttagcagggaaagctaaaaatgatttatcattaattctctctctaagcatcattgcggccaatagggtgaaagaagcttataaaaatggtgaagatttaaacgaaacattaaaagctacagtagttatggccacggcattgcctgtaacggaggttaaacgtaatggcactcgtgatgaatatcgggatcgatatctgaatgcgacgcatactgttacttttcataatttcgttaatccaattaacgtatcaattaaatttaaaaaagtatatgtggctgttgaaggtgaaactgcacaaatgtttatctcgtttactaaagataagcttttcttaagtagtttaaaaaaagaatatcaaaaaaaatatccagatctgtcaaagaaaaaaccatttgaggtaattttaagcagtaaaaatactattagtattgatattggagcaggtacaactgatgtgaacgttattgttaatggaagagcaaatgcgaatatatctatttcagtaccgtatggttatggaagtgtactggaagatgcggtagatgttttgcaagagaaaggatacccaattttaaatcgtactcagttagaagactttttaaaggacaatgatccgcttggagaagagcgtcgtaaacgtgttgaaaaggtagttcaagaacaatatgagacgcttagcgataggatcgttgctgcagttagccgttcactcagaaagtctggagcttctgctcaggcggtttctgtaagcggaggtggatcaattcctatggttaatagtcaattggatcgtaagcttacagaaaagattaatagttatagtggaggcaatgaggatatacctgtactttggatacctaaagaatatgcccaaaacatgaattgcaatggtttggagattgttgcagatcacctttttgaataaaataattaattaaggggagattatatgagtgatttaaaacaacgaatggtccgcttcccaaaaggatccgtttctgatcaatgggctcaaaatcaggataattttagtctatctgtaaggaagctggttgaagcaatcgtcccaatttatggagatggagactatattgatgttttaaataaaatgagtattgagcatttaaaatctgagctaaacacttcagataataatagaataagtacttccaaggatgaggtaactagagatgtcagaaacgaaccgaaacatttagtagatactcaagaaaaattagaagaaaatacttctaataacaaacatgatgacgataatagagacccatttcattttctttcctaaccttaaaggcaatgagcaaagtagcttattgccttttaatttttttgaaatttgagtatattgccacatcaattaaattcaccttaacctgttaatgaacagtaaaaatactgaaataattataaggaggatttgacatggaaattgatccaacgactcaaattgcaaagaatacagaagtagccacggataggacttatccaaactttatggaaacggctgaaagggtggcgtatgcagaccagaatgcggtagccgaatataaacgtgctattactgctgacttggatgttaataatttagtaaatgctatgggtgaagaaagtactattttcaaacttggagaacgtcttgttccaatgctgaaaatgcgtcttcagaatggagctcctatctacatctccattaacgaagcaggaagtaattatcgacatttagatgcgctagtaggtaagtctgttaagattgctgtaacaactttcgataagacaggtacttttgacgaaaatggacgtccagaatatattgctctagggtccattcgacaggcagaatttgttattggtggaattctatatagtgaataccagaaagcactagaaggcatcgaggaaaacaggactgatgtcaaagaagagaataacagtaacccaattcaaagttcgtttacagatgagataagagaaggggttgtttctgaggttattgatacaccacgtcttcaaatgatctttattgactatcgaggtatggcaataccaatgtatgcaaatcagtttgcctatatgacctatacacaaccgctaagtaatttagtaaacattggggacaatattcgattcaaaattagctctattacaaagattaattatgaagatatggatagtgtcaaagaagatatcgcaaatcatcgacagacacctaaaggtttacgctatcttattagaactacctccttaccattccgagaaaatcctgaggggcgcgttaaacggctacaaaagtcacaaagttcttttattgctcacgtagtccgctatgatccaattcgaggaattctagttgaaatagctcctggttggtggattaaaggagtactacctgcttcttcaaattacaagccatcgattaatgatgagattgcacacacacccgtaacagttagaattaataatcttgactatacaacgcgaagagggcgttgtagcattttagcttttccgcgaggtgtagcaaaatctgctaatcaacgcttttagaggtgatataaatggctgacgaaaataaaatcggcccagtaaagctttctgatagtcgattcgtagatccagagactggacagctaatcttgccttcacttatggataaggatcaagaagagcactttaagatttatcctacttggtttgttggggatagtacatttagtgactcattgcgaaaaattcgtaactacgataatgcggaccaatacagatcagtctatattaatttaagtcaagctgatttatattatttgaaattcatagcaagttttaaaagtgctcaaaaaattcatttaatacgggaagcattactatatcctgagttatttgatgcgactaaagttgataagtcactaaaacatttatttataaataatttagtgtggcgatggtcatatgatcatcctgtttatgggaaaccgattgatgtctatacattatctgccaatggatattattttctaaagactttatttggtagggaacattacttttatccaatgcttcttctctcgccaagaattccagatattttccacatacgtttctgggaaacaattgatctctatcaattacttgcttctataccggcatataggggatcaacaaccttattcggtggtagtgaagaaaagaaattaatgaaatcacctttacaggttgctttacatttaaaggacgaagtacagaatttagtattctatcctatgttattgactgatagcgatcagtattattcatcagtcattgaaaaatgggacgatttcactaataagggggaaaatctaaacactgaagttaatgaattaccagggaagcaaaatgttttaactttctatagtccaacacttaaatatgcagttgaatttgctaaaaaattcaagctcgggcagtatcatttcccaatactatttgtgataggttcagttattaaaaaatatgggattcaagaagctttctttgctccgcttattggtggaaaagataatgaattaaaacaaattaaatttaaggagttactagatgagacagcaaatgaaagttagaaaaatattattactttgtttagttttatcattggtagtaatcctatctggatgtggaaagcaaaaggtaacgacagcaaatcagcataataaacaggaacaatcggattcaagttcttctagacccactttaagtcttgaatttgttcatggagaatatcagcaagcagccggccttatctcagttccaattgtttttgaaaatactggtagtaatcaaaccttaattgattctaataactttactttaattgttaatggtaagaagtatcatccttatcaagaagacaacgaggcttcagatttccatattgatttttttaataataatgtttatcagaacacagtaacatttaacataaaaaagcgattaacaaagtctgagctaaagaaagtaaagctaacctatctaactgataagggaaacgaagtgaccgcaaagaaaatcagtaaaaatgtattacttcaagatattagagaaaatgtatcaggatataatccaacagatgttggaacttattacaaacaaagcataagctatttagaaaatgctgctgaacaaaagaaaaaggatccaaatgctaaaataacttcaattgaagatcgttttaatgataaaaaatatgatcaatttcatatttgggtggcggtaccatccactggtaatgtaggcagtaacgttgttgtattcaaagtacttaatgattccaatacagattttaatgtttcctatggtgatcttgaacttgtcgataaaaatggtaacgagattcaggtggcaccatcatatcgaaactttaatattcaatttccgcatggtaaatatactacatttgtagttcctatggaggctacgttaaaatttagaaaacaaccatatcaagttgaggtaagagctgattcatcaggaaataatccaaccgggtcttttttcaatactaaaaaaagctttaatccagctgaagttaaattttcaaatgaaataactagtgatactctattctctctatctcctgtgcaatatccaaaagataaaatagtgtggtcagatcaaaaggttgatacggctagtaatacaattactgctgaggtccaattgatggattattttaatctaaagaatgacaattatcagttaattggatttaatgatgatggtcaacgagagattgaaggagttaaagcaaaaccagcttatgttgcaactacggataaaacaaagattacttggaaagctaagaacatgaattccgtaatggcctatcaacatgttcaactacaaagctatggtaaaacagtacttaacctaaaatagaatagtagacttgaaagaagccaagttcatgttaagaactcagcttcttttttgctaatattcgttgaaaatgtattcaaaatgacttatcatatgaatgacagatgaaatccaatttaactgttaaggtctacatatttaataacatattaaatatctattcgtattaagggggatactaaaaatgcgtacgcttagtcgccgtatggagatgttaatgaatgccaaaatactagacgggggtactatcacatatgaagaacatcgtagtcattgtgatggctgtgtatattgtgaacatttacgtctactagaagaggcaattaaacaagacgaaaatttagacaaagtatatcaagagactggtgtttcaaaggagcgtcagatttatttgcgtgaatcacttgagccacagcgaattgaagactttaactttgaaccaggagatatctatactaagactggaaacattaatcgtgagacttacttagtattgaagtttgttgaatttaaggatacagaaattcgagattattttggaattaataccaacaaatgggcgaaatttaagaagcaagaatttccaaaatggaaaacaaaagataataaggatagtgttcttgctaacgaggcatttagcgcttataagcgttggtgcaacagtccaaagaatcgacaaattcgtttatcaaataaataaaagattgaaacggctatagcggtaacgcatagtcgttttttaatttcttaagtgatctgcagctctatctaaaaactactcataatagtcttataaatagaataaggagtgactatccatgaacctaaaactaagtccgttgcttttatcaggggattttcagcacggtttaaataacattcccgatactgggggactagggggtagtggaggagccgactacacaggctctttctatggctttgtgatctcaaaagaaacgttcgcagaaattgggcgatgggttaatttattaaatatcctattagtgattatgattatctggggtgttattcatgttgttattagcatcattggtaatagtggtaaatggcggaaagcaggtagttcgattgcattaaccggatatgggttgctactattcgtacacatggcaataatcgcgggttgcgcatctgggcaattggctgatggtaaactgattatctttattctaattgcattaagtcaattggttttttatattggagcaccaatgctatttatgttaggaagtgagtggcaaatgatggcagaaatgacagaacgaccacaatatatcaggcaggcgacacgtgcctatggatccattacagctttgatggcgtttggcgcagttgtttacttaataggggagttgatgtagatgcatagaaaaaaagatgattatttagaaatagtatttagacagggagtaaaactaattattagcggagtaattattggcctattgatggggctcttttctctaattgctagtagcaaaaaaatggcttattgtccttttgaatctacagctgaagcatctgtcttaccaaatttttggcataaaaaagatcaaccgaaaccattgcacattactacaaaaccacaagcagttgaagtcaccactgttaatgcagataattctttaacggttcgtggggaaaatatgtaccctaaaagagtcaaattgttattactgtcttatccaccgaaagggtgctatggccaggatacagcgcataaagaattaataaggttaacgaaaggtaaaattatgtggatctttactgataagcaagctcaaaatagcaactatgtttacttgcagaaagattcaaaaataattcaagaaagaatattagagcaaggagatgcagtgatgtataactataatggctctgaaaaatatttctataacatgcagaatgcgcagcaaaaagctaaagagcaactaaaaggtgtttggctagtcccagggtacgttacagataacggctacaataagaaagtaggtcgtgtaaatggaaattgataacaaacataagtactcgctagatgacaagtacaaaaagccttatgacggacttctgcatcgaattcaaactgtttcccttttaacaatggctggttgtgctttaactatatttattgttcaaagattatgtcctattatttttgtgaaaatagaagctacaatacttttagtcgtaactgttattagtttttcgataggctttatctggcttaggagagatttcttggtttttaaggacctctatctacacaacttagatctgcaagaacaagtagcagaagagcaaaagaaacaaaaactactaaaaaaaggattgaaacatgcaaggaaaaatcattagaacgatttggattactgcctgcatgcttttgtttggaatagcggcaggctttctatttattaatacacagattggccgatcttacatagttcgtaataatgccactcgtatttctaagactttgacagcggctgaggcgcaaaagaatcaaaaagcttcaacttcatatgacgcaagtaaaactcgctctgtaagtgcagagcagcttctcagagcatcaaaatatgaggctttcccgatcggtagaatgtcaattccagtcgttaacacccataatccagtctttaacggctttgggactcaaaatcaaaatcttagtttcggggtatgcactgtaatccctgatagaaagttaggaggggataataactatgtattagctggtcactatatgggaaattacgggccggctgttcttgacaacattcatctattgcataatggagaccatatttacgttaccaatttacagaaaatatatgtttataaagttactaagttgtatttagcactgaaaccaacacaggtgagtgtagaaaataacataggaaagcagagtctgattactttgattacttgttctgattttaatcaaactaaatatggacttggtaaacatagaacggttgtacaaggcagattacaaagaacctatcctgcaacagagaataatttaattcgatatgaattaagtagtgaaattgtaaaaaagactgttcatcggcgttcaggaactacgaaactaaataatatcaatttctcagaaatatgcgctgcttttgcgattgtctgggtattgatatgggcgtggctattgattcgagtttggaaaagataaaaaacaataataaattttagttccacttatgaggtgatgtgaatgcctttatcatatttataaggccttaatttaatagaacactatattgtacgaaataagaatattggttaatttgcaaacaaaaaagcctgtcataaagacagacactgttatattctgctgaaatgattggcttaatcaaacaggcactaatacaaggataaagatgctggtatgcaaattggattatttggctacttatccgagccggcgaaaagatgccctttttatacctaaagtcaaccgccatcgactaaagtcacggtatttctggctgaatatcataaaaaattcaaaattagatttttatcgtcttggaataaggtaactcgattcggcagccttagcatatactaaaaacgttaaatactttacttacataataaagtatttgactaggcatattttacggtgaacttatagaattcttgacctatttattaacatttttgaaagcgagttctacgcattactccccctgagtaatagaataattaaatataatcgccctaaagaaagtcaaggataaagagacccattatgatgcacctcctagagttagcaataaactctaggggggatttttgaaattaggcaagaaaacaagttctttttaagtgttttcagaatactattagtgctaatcattcgtttctttgcaaaaaaagtgattgtgatgatgaactacacaccgactaaagtcggtggtttctgggaacgcaaagtagtatttaggctgttacattggtattccaaatacctaacttacagaacttcgttcttttaccacggctagtccctagccaacggcttttaaccctttatgcagaatattaactgccgcattaatatcccgatcgtgatgggccccacactttggacacgtccattcacgaattgcgagcggtttagccccactatggtagtcacaatgactacagatttgactggtatagtggggcttgacaataatgagctgtttaccataccagtcacacttgtatgcgagcatggtacggaattgatgccaactagcgttagcaatggccacggcaagatgatgattcttttgtagattcttgactttcaaatcttcaatcacaatcacatcgtattgcgtgaccaatgccatcgtcaacttatgcaggtaatcaagtcgctgatcagtaactcgtcgttgatagtgagctttctgaattcgggcccgttgccagttctggtagtcattcagttcctctttgacgtcctgatggttatggttccattgacggacactcaccgtggcttgatgacggcggcgactatacttggactgccaatgttgcgcctgttgagttaaccaggtagcgtcaaatttagcatacttatggccgtcactagtaatggctaaattagttacgccgacgtcaatgccgacctgttgactagtcttcggtagtggctgcactgtggtctcaacctgtagtgacaggtaataacgatccgacggatcataactaacagtatagcgtttaatcttacaatgagttaactggcgagttttgctggttttaatatagccaattttgggtaatttcaaatagcggttcgccactatttgaattttgcttttaccagtataggaccgcttagcagacatgccatattgatcaataaactggctactaggattgttttgataacgttgttttgccatatcaagcatctggttccaaacaaagcggtcattgccaaacatttgccatagttgagcttgttgttgcttgttggggtacaagcgaagcttaatccctttcaaaattgtggtcatgttttcacctcctttatgctttaattttactaaatttgcaggggtgaaaacgagattttatagactttttagtaagaaaaagcagtctcatggctgctgtagaaggtattcatcccatgactaaagtcacaggctttctacctataattttcagtaaataatggaatgccctacagttgttagacaaagaatctaataattgtagggcactttttctatggcaaaatatcaagttgtgcaggaatctctaactagacgcggttttccataaaattgagtacctcccccgtaattagctaaatggcagcaaaatgaaaaacgtaaagtttagtaatttaactgctactaattagcacaggaggaatcttatatggcgcaaaagcttatgtcggctaactctactgacaaaaattttaaaatgtataagagtaagaaaagttgggtattcgcatactctacaacattagcattagctgcagttgccggcattacactgtctacaactaatgttcatgctgatacaactaatgggggagacaaccaggtaaatgctacggcagttactcaaaacacaacgagtaatacggttgatcagattgctgctaatactgcgcaaacagataacactagcacaagtattaatattagaagcttaatggatgacttggcatcaggcgatgacacgtcctctagtcaaaacggacaagaacagtcacaaaattatgcttccagtaatcaaaactcccaaacccagcaggaaaacggaactacaggacaaagtactgcttctcaaaatggaactacctctgatcaaactaattctgatcagagtgataagaactactatgtaatttcaacccgggatttagataaaaacgggaatgttaattatttaactcaaaagaattacaccagcatcaagggacaagaagttgctgatgggacagttgtgacgtggccgctaagtgtttcggcactaccggcaaatcgtgctcaagatttgaagagccacgttatttctgaaaccctggatcctcatttggaatatcttcattatcgcgcttacttaactaatactgatggaacagtaacggatgttactaatcacgttaacttgaatcgcagtggacagacattaatatttactgatgataattatctactttcaatctataacaataatcgctatcgggtacagaacttaccagtaatcaagctagtcacaaaggcaaatggtaatggttatatcatccccaacgcttttaaatcatcatatgtctttaatgatggtagccatgatgtttcatttacaaccacgtcaaataatgttcaaattaagaccttcaacccaggtaatagtaaggatgttgaaattggtggcaatgttcaaggtgatccttccggaacaattaatggacaagtagttgcagacggttcagtggttacttggccaatgtctgttggtgatttaccggctaaccgagcacaagatgttttaagccatattgaaactgatacgttatataacggtctaaattatgaaggataccatgcttacttgccacaagctgatggatcattccaagacgtaagtagccacattaatgttcagcaaaacggtcaggatttaacttttattgccgacgactacttaatcggattatacaatcaagacaagagtactgcatttaagatgccaatcattgacttgattacttcagttcatggaacttcaattattgctcctaataagttcaattcacaacttgcttttaaagatggtaatggccaaaccgttattaataacacttctaatcaagtccagatttcaacatatcatcctacgaataccaaagatgttgaactcggtggcaatgtccaaggtgacacaccaaactcaattaacgataaggtagttgctaatggtgctattgtaacctggccaatggcgtcgtccgaacttccagcaaatcgagttcaagatctgcagagtcgagttatttcagaaactctagattcacatctgcaatatcaagggtataaggcctggttacaaaatgcagatggtaaatatacggatgtgacttcgcacgttaagttgactcaagatggtcaaaacttaacgtttgccgatgatgagtacttactaaacttatataactcaaataagggtactgcttacaagttaccgattattgatctagtaactaaagttaatggagcaggtattactgcgcctaattcttacacaactaagtatgtttatagtgatggggatgggaacacaactatcaatgtaacctcaaatactgttaagatcagtacattcaatccaacaactaataaagatgttgaacttggtgataacattcatggtgatactgagagttccattgctggtaaacttgtttctgaaggtaccattgtaacttggcccttatctacttctgacttgccggcaaaccgtgctcaagatgttgtaagccacactgcggttgatgctcttgaaccaacccttcaatacattagttatacagcctggttgccagactctaatggtcaattacaggatgtaaccagtcatgtaaagatgactcgtgatggtcagaaattaacattcaccgatgatgattacttaattggattgtataaccaaaacaaggatatagccctaaagatgccaatcattgacctggtaactaaggctactggtaatactaagttattaccaaattctttcgattcacagtttgtctacaatgatgtagatggtaatacaattattaatgtttcttcaaacaagccaactgttgaaacctttgatcctacggttcataaggatgtagaactcggtggaaacaacgtgcaaggggacactcctaactcaattgatggtaaaatcgttgctcaaggaacagttgtaacttggccaatgagtactagtgatctgccggctaatcgaactcaggatgttgtatcacactctacaagtgagactctaaaccaaaatctacagtacgttggctatcatgcttatatgccagatgcaaatggaaaattacaagatgtaactagtcatgttcagctacaacaaaatggtcaaaatcttgtcttcactgatgactcttacctaatcaatttgtacaaccaagacaagagtattgcatttaagatgccaattattgacctaatgacaaaggctatttctgatagtgcaacgattcccaacacctttgaatcacaatatgtctttaatgatggaaatggcaatactacttttaaatctacttcaaatactgtccaaattattacctataaaccaaagacgacaaaggacgttgaattaggtgataacattcatggtgatacaaacgcttcaattgcaggtcaaatgattactgatggaacagttgtaacttggccaatgagtactagtgatctgccggctaaccgaactcaagatttgcaacaacacgtagttaccgacaacttaaatgacaacttgatattccaaggctacacagcctggttaccaactgcaaatggtttagtcgatgttactaatcatattgaattaacacgtgatggtcagaacctaacatttactgacgatgcttatttgctcaatctatacaatcaaaataaggatactgcgtacaaattaccaattattgacttggttactaaggctaacggtaatactaagttaatccctaataattttgactcaatgtttgtctacaatgacggtgaccaacagactacagttaatgtaacctccaatacggttaacatcagcacatatgatccaactgcaacaaaggacgttgaacttggggatgatattgaaggcgatactgcggacactataaacaacttaatggttcaaattggaaccaagatgacatatccattgactgttagtgatttaccggcaaaccgtgccgatgaaattactgctcatcaaagtgttgatacattgagcgactacctcgagtatcaaggctacaaagcttacttaccagatgctgatggtaaactccaggacataactgagcatgttaacctaaaacgtgaaggtcaaaagttgtcatttaatgatgatgattatctcatcaatctgtacaacaattccaaggctactaagcaggctttgccggttatagatctggtagccaaagttaccggtagcaatgatggtaaaaaagtccacatcattcccaaccattttgattcaacaattactactaaggatgggaagattaacactacttctaatactgttgtgattaactcgaatgatccagaagctgttaaagacgttgaattgggtgataacgttgtcggtgatactcctaattctgtaacgggtaccacggttgctgacgggaccatcgtaacttggccaatgtctgttggcagcttgggagcaaaccgggcacagaatgtaattaagcacaccgaaaccgaaaatcttgatagtggcctaacatacttgagctttaaggcctacttaccagacgctgatggtaaaatgcaagatattactgaacatattaatattcaacaagacggtcaaaagttagtattcaccgatgatgactacttaattagtttgtacaacaaagataagtcacaacgttttgctttacctgttatcgacttagtaacacgagtaaacggtgataacaagataattccaaacacatttgtttctcaatttacgtttaacgatggtaagggcaatacgattacatcggtaacttcgaatcaagtcaatgtctcaacatttaaatcaaatcctgaaaagcatgttaccttaggaactgatattgaaggtgatgatgctgaaaatgctgatggcacagttgttgcacaaggttcagaagtaacctggccattatctgataagagtccattgccggctaaccggtcgcaagacgttaagagtcatacgctagtggacaagcttgacgataatctgcaatacaatagctataaggcatacttgaagggtactgatggtaaactgcaggatgttactgatcatattaaactgactcgtgatggtcaaaatctcactttcattgatgatgattatctacttgatctttacaataaagataagtcaacagctttcaacttaccgattattgatttagtaacgacagtagtaggtaatgataagctaattcctaacaagtttgactcaaactttgtcttttctgatggaaacaaagacacaagtatgaagacaacttcgaacgaagttagtatttcaacgtacacaccggttactaataaggatgctgaactaggtgataatgttgttggagacacttcggattcaatcgcaaatgaaacagttcctgatggaacaattgtcacttggccacttagtgtttcatcattaccagcaaatcgttctcaagatgtgttcaagcatgttattgaggacattcttgatggtaacctgacttataacagctttaaggcttatttgaaagatgctgctggtaatttacaagaagttacggatcatgttaagttggctcaagaaggacagcacttaacctttacagatgatgattacttgattaacttatacaatagttcaaagaacaaggaacaatcactaccgattattgatctagtaacgacagttcatggtgactcaaagctaattcctaatgaattcgataatgtatttgttttcaaagatggaaaaggtcaaacaactgttaaaactacttccaataaagtgactattaagacagcaagtctgcctacaccaactaaggaagaaacagatgatcagggtaacaatattaacggtaatgaagttaaggctggagaacatgttaactacacattgaactgggatctttcaaacgataaggatgttaaagcaacaccagaaatgatcaagaaaggcttcttcttcattgatccaattgattctcgtgctttgagtgtagatgatttgagtaaggctaaagttgttgatcaaaacggcaacaaagtagatggaattagtttccacttatataacagtctttcagaagtacctgaatttatccaagaacaagtcaaggctaataatcttcaagacaagatcactggtccgtttgtggttgctcaagcagatgatctacaagcattcttcgataaatatgttaagactggtgcaaagttgaaagtaacaattccaacaattgtaaaatccggcttcactggagagtttagcaatactgcttatcaattcggctttggtaaggcaacaccaaccaatacggtaacaaactatgtaaagccaatgcataagcctgcatcccctgaaactccggctgcaattgcgccacaggttattagtgctacagcacaaccaatgacatcggatgcaccagtaacgcctagtgaaaaaacggctaaattgccacaaactggtaatgctgacgaaggtgcgttgttaggtttggctgcggtaagtctagtaggtagtctaggattagctgccttaggacttaaacaaaatagaaatgatgattgagcaagaatttatcccatagtttgcgagaaatccttttagaagagcttgcctaataatagcggctcaatataatttaaatttaaaaccacctaattagcaatcgtaaaattgttaattaggtggttttagtatagaaataacccctaaattcagaatactagaaaatctagtactattattttttccttttcgggaataatagacatgaaagacaagaaaagataagaaatggtaaggaaactttgtacagtttaataaaagcagttgagtattgactattggcgtaagttttgatttttttaattgtaatattaatagaattatttaatctatgaaatactaatttcacatttgcttttgtatgtgaataaatctctttttcttggatcttagagggttcgtaaggtaaggaattaatttgtttagtatattctttatccgtagtttctttaattaatttcttcgaaaaatgctttgatggtgttcgagagtttgaattgttgtttaagcttttaatagagttatctcttattttatttttttgatatttaggaatatttaagttattgacctgctgattgatgtaactaatagaattatgctttgcggtatttaaattcccatatagtccagttagaaatattgctacagctaaggaaacccctacttgtcttaaaacacctgcaacactttgtgaagcggttaagagataaccttcaaagtttgatgctgctaaaactgttattggacctgcaataatcccatacccagttcctaaaataatacaagtaaaaataattaaggtaatattatccatatcaatatgtgtaaataaatagtaagagatacccattaatagaaaaccagataagataatggctcgagatcctaatttgtctaagagaattgcagaaagtggtgacatgataaaaatcattcctgtaataggcgtgataagaagtgcagcttctaattcggttctatgttgtatatgggtaaaatatgttggtaaaattactgtaacagccaccagaaataaattacttaaaattatagaaacggcagagccggtaaattctctattcttaaataaaacaagaggaatcattggtgctttagcataatgctcagtaattaagaatagtatgaaagttaaaatgaaaatgaaaaacagaaggttgattgcaggacttttccacccccagcttcttccttgagtcaatattagagttaaagctgaaagtaaaattatacctaaaagggaacctaaataatcatttccttcatttgactttggttcgtgaaagttgaaagtagataaacaaataactagtgaaagtatagtaaaaggtatattaacgctaaatatagaatgccagcccataaattgagttagaatacctccgattgaaggaccaagagcagcagctaaaccttgagtgattcctaatgcggcaataactttttttcttgtctttactgtaacgatatttattccaatagtcattgaaagtggaaaaagaattgcggctcctaatgattgaatgccacggccaagaattaaaatagctaggttaggacttataccagaaatacttgatccaataagaaacataattaacccaattatatataagaaattcatacctaatttttctgcaagtttagatagtgggatcgttaaactagcaaaaagtatagtatatatgtttaatgcccaagacaaattagttagagtgacgtgaagttcgttttgaatagctggcaatgcaatattcataacagttgtatctaacatacataagaaaatactaatacacattgcaattattattagaaatttgttttttcttttggtcatacttgtttcctcactttgtttatattaacaatgttaatataaacaaaagaaaaataaatgtcaacaatattatcattgtaaatatgaacaatatgtattaatataaataaaaattagtgaggtgattttatgacagctgtaatagttggaattggtattactagttcctgtggagagtcctttacagaaattgaacaaaatgtaggtaaaggaaaaacaggtatttctaatatcgattattttgatacatctgagttaacatgtggaattgctggtaacttatcaaagaaaatatggaaagaggttttgcaaattgctgataaaaatgaattagattggagtagtagtctttcaatttatactattcagcgattacttgaatcgtataatatttcaaaaaaacaaagaattggtttatctcttggaacatgtaatgggggaattcattctttagcagaatatcttgatacttcaaatgataaatttttaaaaaattatcctccgtacattcagagtaaagatatcgcacattatttcaactttaacgggccaaagtattcttttaattcagcttgtgcggctagtgctaatgcaatagcttatggagcagaaatgattaataatagcgatgcagatcttgttgtgacgggtggttgcgatccaatgtcagaatgggtttttgctgggtttaattcattaagaacctttaatagtaaaaattgtatgccatacggtgaggaatatggacttaacctaggagaagctgctacatacttcttattagaagataaagataaggcaattaaaaaagggcataggatatatgcggaaattttagggcacggcttatcaaatgatgcttatcatcctacagcgcctgataaggatggttcagggatatcctatgcaataaaaatggctttaaaaaactcgggtctgaagcctgaagatattttatatattaactctcacggaacaggaactaaagccaatgatagtgcagaatacagaggatttaaaactgtttttagaaatgagatgccttttattagctcaatgaaaggatacgtaggccataatctgggagcagctgctagtacagaattagctataagtttaatcggtatgaatagtcagaaagttttgtatcctaactttaatttaaccaagtatagagaagattgtaacgatgagcatatcttaaaaaagccttattcattagatggatatgaagatatcaactttataaacaataatgctgcgtttggtggacaaaatgttgctgtaattttccatgttaatttagaaggaaaatatggtcatagtgaaaagaaacttaaaacacagcaacctatatatattaataattttggcgttgcaagtgataaagcttatatgacaaagcatggtattggtattcttgacgatttacgccccttaaagaaaaaatatccaaaattatataagcgacggatgaatatgttaactcaagtaagtattatcgcggctaaacaaacattgcaggatcagtatagtaattgtgggcttgtgtatggtacgccttttggtagtctttcatcaacactaaaatatgttgattctattcaaaaatatgggtttaaaaatgctagtggggcatattttccagatttagttattaattcaacgacggggcatatttgtcaagcgctttcattgaagagttatagttcatctataagttcaggaggtgatgaagacttaagagccttaattattgcacataatgcgcttaataaagggtacgcttcaactatgttagttggagcaggccaagaagagacagaactgggcaataaagtgttgaagcgtgaagttaataatcatgcaacatttttaagccttagtaacaaaaaaatgcaagaaacaatagcagaggttctatcttccggtgcaatgggatttaaaaataaaaaagagcttttgaccattatacgatcgaaaatagatgagaagttggctaatgatgcagatctaaaagtgataattcaaaataatagtgaaattacgaacgacgaattaataagttatttcaagaatgataacaatatcagtataaattctgataattttgcggatagtaattttaaatcatttgttaatcatagaaatgaaaataggttgttgcttgttggaatttcacaagtcaatgatgtttcgtttgcagatattaaaaaaataaaatagagaaagaggtaatactgatgaagcatagtattgaagaaattaaggatattttaaaagaaaaagtattaattgaacgattagagttagatgatgtagaacccaatgatatttcagataatgaaaatttatttgatgaagaaggactagcgttagattccgtggaagcattagatatcatgacaggaattagtgaagaatttggcattgacacatcaatgttagggcaggaagatataaaccattttcaaagcgttaatgatatggctaaatatatctcagagaatgaatagaggatagttatgaaatcagtacttatcacgggaataactggaggaataggaagaaaattaactgaagcttattcttcaaagggatatcatatttatggtacgtgtagtagaaattcagactctttacaacaatttaaagagaaatggcctagtgttgaaataattcaaataaatcatgatgacttgatagatgtaagtacagaatattcctttttttttagaaaagtgcaaccagatattgttattaacaatgctggaatagtgaaagataattttttagttcaaatgtcagtgaatgattttcaagaagtgttgactactaatttgatttcggcttgggtaatagtcaaagaaatgcttttacatttaaatgataataaaattcataaaatcattaatgtagcttcaatatctggaattatagggcgtgaaggacagtgtaactatgcagcaactaagggaggattagtaggcttatgtcaattgatagaacatttagctccgaaaggcagtaatgttatttcattttcagttgcaccaggattaattgatacagatataaagggaaaaatgccaaagaaaaaaatcgataatttaaagaaggccacattggcaaataggctaggaacaccagaggaagtatcaaaatttatttttaaactatctgaagaggatatttcgtatagtgatggaactttatataggattgatggtggagttttaaaatgaagataataaataatacgattcaagtaaccgacttgcttcaatcatatggaaaagatgaaaaagacatagtaataattggtcccagcccatttaatgaattagattgccttaaagaaacaaaaataatcgataaagttcagcttaatttagaggaagttttttcatttgtaaaaaataatagcgttgctttaatgaaaaaaagaagaggaaccattgcctttttattaaatccacaaagttttgagggaggcaataatatctattctccaatctataattcagcaattaagagctttttgaaatccttatcgaaggaaatgaatccattcagagttaaagttatggggataatcttacctttaacacaagatacaaaatcgactcggaaatatgatttagttacattaaagtacaaaggaattaataatgaaaagcaggtacaagatattctaagcttacttaagctttcagaaatactaaacggacaaattgtctcgctaggcgctgaattgaatctttagtaaaggagagggaaatcattttatttctagatcaaaatgcagttataaaaatgttgccgcagaaggagccattcaggttcttagatacggttgaatgctttgatagagaaaaacgtatgattactgcattgcaacaatttggtaatgaggaattcttctttaagggtcattttccaaataatccaatagttccaggggtacttctaacagaatcgattgctcaagcaggtttgatattgatttctttattagaaggccaaaaagtgaaaattggatatctagcccaaattgaaaagacaaaatttttcaaagaggtctatcccgacgagcaagtaaaggttaaatgttcattaaagaaaaaaataggtaaatactattacattgcaggagaagtctactcgcagcaattaaataaaagatgtatgagagcaacagtaatagtatgtatttgatatggtgatggttcatgataaaaattactgaaaatatagttcaaataaaactaaagcaaggcaaaaattatccagacgttaatgtttatgtacttctaaaagaaaaagtgttaattgatataggccccaaatcaattaatacacttaaccttttaaaaaaagaattagctaggttaggattaagttttgaaacacttaatttaattattctaactcaccatcatgttgaccatgtaggacttttagagtaccttccctctgggttacgtatcgttggacctgatcatttagacttttatagttcagatatttataaaaaaagtattcaaaaattgttagttgacgataatctctctattgaatttaaaaatgatatagaaaaacaacttactactgaaataattccaagtattaatagagaaaactacgttccttttagtgagtcaaagaaaattttgcaacaatttggtcttacagctgtagagctatcaggtcattctagtgaagatattgtaattactgattcagaaaataactgttttactggtgatattattattcctaaaattttttttaactgtatatatgaggttgataaagtaaggcccaaacatcaacgttggtcatattatcatgagcttaattttttagacaggttagtaaacctagtattgccaggacatggagatattctaaagttagaagaattaaaaaaggcagttttggttaatagaaaaagaatgagacggacagagaaaaaaataataagagagttaaataaagaaacagttaatggagtggagaatgtttgtcgaagtgtattccaaagttttttgccttatagcaaattcttaccgttttcagaagtagttagtgttatcgagagtaatgatgagagaattaactattgatattatttatataaatacactaaataataacagctttgcaagtttagattctagaaaaagaatcaaaaagttacagcatcagctaggacaatatatgctttctcaaatatcttataaaaaaggttattcaatttcccatagtcatatgtgtgtagccttagcaagttatgttaatagggttggtattgatattgaacttataaataaaacaaagaaggcaaggatacagttcctttcgaaaagcgaaaaacaattagtaaatagatatggttttacaagaatatggacactaaaggaagctatagctaagtatcataccgttgggttacctcggcttaatacagttgagattaaagaaataaatgcttcgaacgttatctattttgttaataaagcaccaagaaaattgcagtataaatttttagatataatcccttcttataggttgagtgtagtggcaaaaaaggtatcaagtttttgcattagaatcacacaagaagaagatttgaaggggctaataaggagaatgtaattaatgcaaggaagagacataattctaggaatacttgaacgaaataatagaacaggatatgaaattaatgatattttgaaaaatcaattatcttatttctatgacggaacatatggaatgatatatccaacattacgaaagcttgaaaaggaaggaaaaataaaaaaggaaaaaattgtgcaaaatgataagccaaataagaatgtttattctattacagatacgggaatagaagaatttaaagaatacttggattcttctattcaagatgatatttataaatcggactttttaatgcgtctcttttttggaaactcattaccaaatcaagaaattattagagctattaaacaagagatacaacgtaaaaatgaaaagatagatcaattaactgtaaattataaaaaatggaaaaaaaatggaatgagtaaaacacaagaaataaccgtcaaatatggtattgcgcagtataccgcaattgttcagatgctgacaaaagagcttgatacgttacgaagaaatgagatggatgattaatgtcattaggaattatatttagtgggcaaggagcacaaaaatctaaaatgggtcttgatttttatgaagatccactatttgctgaattacttaaccacgcaagtaatatatctggtctaaacatgttaaaaatcttggaaaacaaaaataatgagcttacagagactgttaatttacaaccaacattaacaacattgaattatggcatatatcgaatgctgaaaagggatatttttgatatgaaagtaagctgtatggcagggctttctttaggagaatattctgcactgattgcttctaatgctttaacttttgaacagggaatacaattactagtagaccgcggaaaatatatgcaggaagcttcgaatagtaatgcaggaaaaatgttagcacttataaaacctaaactaaaagagataactcaaatttgtgctttgtgtaaggttgaaattgctaattataattctccaaagcagatagtaataggcggacaaaatttgcaaattgaatttgcaaagaaaatgattatggagcgtaaagctgcattaagaataattgagttagaagtaagtggcgcctttcatacttcgttattttcaaatgttcaaaaacaattggaaaagcgattaaaagatgttaaatttgagaatccacaaattccggtagttagtaatactacagttgaggaatttcaaaaggaaagtcttacagccgtattatcaaaacaagttgctaatcctacatattttgaaaaagatattaagttaatgaaaaatacttatggattgacacatatagttcaaattggtcctggtaaggcattaagtaattttgtgaagcaaatgtcattaggaattaagacatataatatttctaatataaaagactatagaaaatttctgaatagttatagagatattaatttgaaaggaaagaaaaatggattttgagaaaattcagcaactaattcaaatgtttgaaagctctaatacaagagaactaaaaatagatgataataactttcacatttatcttacaaaaaacgtaagtaaagaaccaattcacgatataaaatttgaatcgaataaaattcagcaagcctcagaggcaaaagcaaacaggaaaacgataacagccccattggttggaacagtttatttagcctcttctcctacgtctaaaccgtatgttcaagtagggagccatattgataaaggagatacagtgtgtgtaatagaggctatgaagctaatgacggaaataaaaagtgaggttaccggaacaattgaaaaagttaatgtagagaatggagaattagttgaagttgggcaaccgttattttcagtttctggagaaaaagaaagttaatgaaagagtgaggtgtagtgatgttttctaaagtactagttgctaatcgtggagaaatagctgttcgtattattagaactcttcatgaattgggcattaaagcggtagctatttattcgattgttgatcaagaaagtcttcatgttcaattggctgatgaagcagtttgtgtaggtggagcacgaccacaggattcgtatttaaatactactaatattttaacagcagcaattggaacaggagcacaagcgatacaccctggctttggattcctttcagaaaacgctgagtttgcaagaatgtgtgaaaaatgcggaatagtatttataggtccgcgtgctgctacgattgatttaatgggaaataaagaaaatgcgcgcgagactatgcaaaagagagggatacctgttattcctggaagtagttcctacataacaaacagttatgatgcaaaaagagttgcagataaaataggatatcctattttaataaaggcggcagctgggggtggaggtaaaggtattagaagagttgtaacgcctgagcaaatgaaacaagaatttaataatgcgcaaagagaagctcgtatatcatttggtgatgatcgtatgtaccttgaaaaaataatgtgcaatgttaaacatattgaagtacaggtagttcgtgatagattcggaaatagtgtctattttccagaacgcgattgttcactccaacgggataagcaaaaaattatagaagagagtccatgctcggttatcaattcagaacaaagaaaaattttaggaaggtatgctattaaagcaattgaagcagttgattatcttaatacaggaactattgaatttttgatggataaaaataataaattttattttatggaaatgaatactcgtattcaagttgaacatactgtaactgagatggtaacgggaatagatctagtaaaggtacaactgatgatcgcttcaggtgaggaacttcctttttcacaaaataatattaagttaaatggggtagctattgagtgtagaattaatgcagaagatcctaaaaataactttgttccttcaactggaaaaataaattatttatatttacctgtaggtaacttgggtatgagaattgatactgcactttactctggagaaaagataacaccattttatgattcaatgattgcaaaagtaatctcgcatggccatactcgcgtagaagcgatcaatagaatgaagaggttaatgcaagaactggttataaaaggtgttaaaacaaataaagatcttcacttatcaattttgggagattcaagttttttgaaagatacagtaacaactgagtatttagagaaaaactttttaccaatctggaaagagagggagaaaaatgcagctgtatgaaagtgcaacgttaactaagcaacatgtaaaggcgaatattaaagcaaatcaaaaagtacctgatgggatgttaaaaaaatgtcctaagtgtgggaaaatctttctgtctacagaatttgataagtatttttcgtgtcctggttgtaattatggatttaggattggttcatggcaaagggtagcctgggcggttgatgaattttatgaagaggatggttcacgagaactaataacctcagatcctttacattttcctaattatgtaaaaaagattcaaggacttcaaaagactactaaggtaaatgaagcagttttaacgggtaaagctaaaataaaagaccaaatttttgagtgtggcattatggatcctcactttataatgggatcattaggaacaattactggcgaaaagattacgagattatttgaacgtgctacaaaggagaggttgcctgttgtcctatggactgcttcagggggagctagaatgcaagaaggaattatgtcattaatgcagatggcaaaaataagtcaagctatagcacaacatgcatcgaaaggacttttatacattgttattttaactgatccaacaacaggtggagtaacagcaagttttgcaatgcaaggagacattattttagcagagccacatactttagtaggatttgcagggcggcgagttattgagcaaactattcatgagagaatcccagatacgttacaggatgcggagaatgtaataaaacatggattcatagatttaatagtatctcggagtgaagaaaaatctttactttataaattgttaaaatatggtaggtgataata

SEQ ID NO: 51 - DNA, 150023 bp, synthetic construct
  misc_feature 1..150023: note = Based on Lactobacillus reuteri
  source 1..150023: mol_type = other DNA
ttgttgagaagcatgacttaaaccctgatccagctactttcaatttccgcaaaatcttcgggacagctgaccggtcagatgcgatttactctgaaccgcgggtatgggttggtcatcaaatgtttagtccccggcaagcaacggaagagaccccagaatcaaccgaactgccatttatcatgaagccggaccataagttatcgatttttgatgcccagaactatctcagcaaccactatgagagaaccgaattcgatccgcttggtcatggtgagcacgctcataagtaccggccaattagtttagcaaagacccaagagtcacatattttacagatgaaccgaccgggcgctaatattcactggttagcaatgggagtcgctgccgaaagtacctatgtgccattcttcaacggtattaccgatacgcccgccccgtataagcgggaagctaccggctcagctcaactctgcttactggattttcaagcatgccagtgtgctagttgacagccacctacacgattttcttccattattacgggatgtcagaaggaacgaaacgccgcggccattaagatgattgccaaactgattgtcgcctcccgagtctcaaaggagaagcacgagcaactttcttaacgcggcaaagcgacgactatgcgaccgatactttgaatgcttataagaagttagccttgaattgattaccaagatgactgattattgtgaattaaactttaatacagatgagaatctgtaaaataaaaaagaagcagctcctaagttggaatttccagcttaggggctgcttcttgtatgcacctaaataaacgaggatcaaagagttttacttcttcaaatcctcgtttatcttaattttgatgatgtttttcaactgccgtaactagttcttccaatgattgacttccaaaaataactgggtcatcatcaatcatcgtcgctggcaataatcttcttttttccgtaattctgggaaatgctgcaagtcaatcatcgtggcagtaattcccacattcagagaagccatccgttgacaagccgcaacaacatcaggagaaatgacaagttaaggaaacgccaatccgaatcttagtcggcgcaagtttcttaattcgttctaccatttctggtgcaattgtttgtccaggaccggcaacgttgtagacacctagaactaaggagtttaattcgtgaccagttggaatccccgcataatgtaagccagtatcattaccatccgcatcaagcaagcgcaattgtggtaagtactttacgtccgctggcgccggtttagtctccatctgcaggtgcttatcaagtgaagcaaattcttcaacaaagctaactaactgattgctaagctctgtcccattggttaacacttggagtttaatatccttagtcaaacgggcaaagattggttgtaactgttggtcaatctcagctggcagccagtttccttcatgcggcgtggtgttttcttgttgactaagttcgcttgtctgtcccacggtcttagcaggctttttattagtttctgcatgaatcgggataccttgcttttccttttgcaaaataatgtatcgttctgcagcagtagaagcaaccgccccatcggatgcagctgtcacgatctggcgaagatttttatggataacatccccagcagcgtaaacgccatcgatgtttgtcttaccattttcatccgtcatgatatagccccgatcatccaaatcaaggatattagctaatgctttcgttgctggttgcgtaccaatataaatgaacatcccaaatgtctggtcaccatcatcgacatggtaaaccgtctcttcgccagtcttattattaaccaaggtagcagtagtaaggtaatcatccccactaacttcctttacctcagtattgtattccacactaactttaggattatccaaggcacgcttagccgtcaatacaggacatgcaaaatgatcgccacgaactaaaacagtaacgtgcttggcaaagcggctcaaatagtcagcttcttcagcggccgcatatccgccaccaacgacaaagacttgaagaccggtaaaaagttcgccatcacaagttgagcaataagcaattccccgtccacgaaattcattttcaccgggaaaaccaacttttttagggttagcaccagtcgcaataattacgcttcgggcagtatatttttgaccactcttgccaatcaatgtcttaacttcaccagtaagatcaaacttttcaaccgcatcatgttgaatttcaaccccaaagctggcgacctggctttgcatctggttcatcaattgggtaccgtcgactttttcgacagctggataattataaaccaccgaggtcgttgttacctgaccgccgacagtatctccttctaaaattaacgtatccaaggttgcgcgtccagcatataaaccagcagataatcccgctggtccagcaccaacgatgattaaatcatataaatgttgttctgccatttagctcaccaaattaaagcttaccaactagatcaagacttggcttaattgaatcttggcctggcttccagttcgctgggcagacccggtcaccatgttcacgaacaaattgagcagcttggagtgtccgtaagatctcatcagcactccgaccaattcccatattattaattgtgtaggattggataataccatcaggatcaacaatgaagactccccggtatgcttgaccagcgtcttcgtcaagaacatcgaacatccgggctaacttaccagctgggtcagcaagcattggatatttgatcttgccaatcttgtcagaagcctgagcccatgccttgtggacaaattcggtatcctcagaaacagagtaaatctcagcgtttgctttcttgaagtcttcgtgcttatcttgcaaagcttccaattcagttggacaaacaaatgagaagtcagctgggtagaagaagaaaatactccacttacctaaaacatccttcttggatacttcggttgtttcaccgtcatgataagcatttaccttaaaatcttcaatttcatgtcctacaaagttcatgtatatcctctccttaaattagaatcattcttaactgcaactcttagtataatctttttatgctaatttgcaagtaattttagaataattccaaaaagatcaaatttccttgccgaagattttcgtcttaatcgcctgtccagttggggttccagccagtccaccgaggcctgtttcccgtaaatcaactgacattgaccggccaaccttatcaagagcagaaatacattcatcggccggaatcatactcgtacaaccagcgagtgccatatcagctgcaattaacgcgttcccagctccaatcgcatttcttttaacacaagggatttctaccaaaccggcaatcgggtcacataccaagcctaacaagttactaagagcaattgccaatgcttgactgctttgttctggactaccacccgctgcttcaacagccgccgcggcagccattgccgatgctgaaccaacttcttcttggcagccgcctgtcgcgccagcaattcccgcatgattggcaataattaagcccaacccaccagcagtaaataagaagcgaatcatctgatcttcactaaggcctaatcgttgttctaacataaaaagagcgccaggaagagtcccggatgaaccggcagtcggggttgcgcagatgactcccattgctgcgttaacctcgttagttgcgatcgcattttccacggcagccatcataacatcaccagagagggtctttccttttgcacgatattttttcagcttaatcgcttcgcctccagttaaaccagtttttgaccgaactcccagctcattttcaccttgtttaattgcggctcgcatcgtcagtaagtttgatcgcatccgttgccaaacttcttttcgattgctaccagattcatgacattctgcctcaatcactagttcggacaatgctttttgctgaatttctgcagttcgcactaaatctttaacactttgatacatcgctctttctcctaaagacaaattgcagccgggtacttcttttcaaaataagcaatcgtcgctggctgcatcggttttttaatatcgtaaacataaatatcacaatcatctgcccgtaatacttgtcgccgggtaaatggtgctttttcttccaaatcagtattgatcgccagtgcattggccatctgtttactataatcgcgaaagataacaattggtaagggacccgctggtaaaatatcaacaccatcaaggttaatagccctaatttcaattatcccgccaccgatcgaacaaccagcaaccgttaccctcgtcttatcaccagtcatttgaaggatggctgtgttaggatggtgaatcgggctttcaccctcttcttcaacaaagcgaaggtccattcctccttggcgagcaatcattggcgccgatggaactcgtgaatcgtctggcgcaaatcctagcaatcccgccgcaattgcatagtctgttccatgaccacgatgcgtccgagcaaaagatccataatagtgaacggttactttaggtggaaccgtgccaaaaagtttatttgcgactcgaccaatcttgaccgcccctgcagtatgcgaactagaaggaccaatcattactggtccaataatgtcaaaaacacttttatagttatttttcatgttgttgttcccttaaaaaatcgagtaggagataattgattagttcaattatcgacctctcacaccaccgtacgtacggttccgtatacggcggttcgacaacttaatcacattgaattgactggagcgtcttggacatattcataagtccgagttgttccagttttctattagttagagaatagctcaaggtcttactgtgtgcagttcgccagtagcccttgcgggtactagcgaagacatatgcatcacgctgggacagccccagcttctgtaagttagttaccttagttttaagcttcttccattgcttccagatatactgtcttattcggaccctcaaccacttgtcaaggcgttgaataaagtcagttagtttcccaattgagtagtactgaagccatccacgcatttttcgctgaatttcttcaaacattcttgtcagggatattccacgattacgtttagttaataacctcaatgctttctttactcgttgttgcgattgtttagctggacgggcgtaggctccattgtggtctacacccaacgaaaagccaagaaactttaaccgtagcgggctaccgactttggttttatctgggttcactttaactttcaatcgcttttcaagaaactgggtaatgcttcgcattactcgttctccggctcgttgacttttaacataaatgttacaatcatccgcatagcgcacaaagtggtgaccacgtctagtcaactctttgtccaactcatttagatagatgttcgccagtagtggtgacaatggccctccttgtggggttccttttccactcttagcgaaaagcccatggtctaagactccgctagttagaaacttacgaatgagtcttagtgtccatgggtcatcaatatattgttggagatacttaatcatcaagtcatgattaacgttatcaaaataggcttttaggtctaagtcgacaactcttcgataaccttgattataaagatctactacttttgcaatagcgtcgtgagccccacggtgagggcggaagccaaaactattatcagagaaaacacgctcaaagataggtgtaagaatttgggccacagcttgttgaaccattcggtccaccactgttggtattccgagttttcttactccaccattaggcttcggaatttctacccgtttgactggtgctggtttatacttgccctcacgcaaactagcgatcaactccgtcttattttctctgagatatggcagaaggtcattgactgtcatatcgtcaatgcctgctgcccctttatttctcttaactcgcaaataagcctgattaaggttattgcggtccaagactaagtcttggatagtgacactcatacctttaccttcaccataatcggtactacgcgcccttgtgtactttcggttttccaaacctatcctcgacaagcggtcagcttgttgttctgttttctgcgattgtcgcacctgattacacctccgatataagttacaagttgttgtcgttcagtccttcatctgattactcagactactatgacctcggctgacttctggcttactcaacgctacatcactgcaccgcttgtttctgtggaaattaaacttattcctcttgtcggaaacgtgtaggccagatctccccgggtaaggatattaactttcgtaccatgtcatcgttagctttactgagaccaacttcgagtagtattggacttcaacttgtctagcagccttatccagttaatttcagccttatagctacttcttgttcatcgatgcagtactttgccttagacttccttcagattccacctcacggtggacacccttgtccttagctcatggttccgactactacggcccatagcggactttcaccacctagctaatacccatgccgggcgcactaaaatagaggttgaaagaaaaatcatgtttttctcaacctcttcattataattactttttctttttatgaaagtcaagaaatgaccagaagccgcgatgaccaccagattttttcttcggtttcttttctgcttttcgatcttctttggcagccttttcagcaagtgctttttgcttggcgagaattcccgcttttgccgctctttttcagcctcttttcgggctgccattgcctttttagcccgtgctgcccgttgctgagcagcttctttcattaattgtggccgcgttccattgtatcaaacattgttgccaccttaatagctgccttattggctaaggcttgatcagtatttgaagccacttcaatattatgggctgccgtaatctcacgttcccagtattgttgtgtcttaataggtaaaccagcaaactcctggctccgtaagaactgacctgctcgtgataactgcatcttcaacgaatgcttatccgtttgctgaccatttaatgcttttcgcgaattataaatcgcttgatcaacaaggtcgaccattgcttgtggttcattatatccctctttatgctcttgaaggacatcctcccccattctaatggcttcatcataaagacccttagaacgatcagtcccattaaagtatttatatgtttgccttacacgtacttgatcagctacatctttacttagttgatcaaaaactactttttcgttcattagatttccaccgcccgactttattcgtctactattcttagtatagcagttattgatcgcgaacgaagctaaaatgtcaattttttagaagattatcgaaaaaggaggctgagaaaaaactttgttttttcaacagcctctttaatctatacgaacattatttaagatatcgtggaactagcttcgcgtcgtaaccacaaggctcaagtctaagtccgaacgataatcagcccgtgccgtgctaatcaccgttctatccttagcccaccgccttgtcgagaaggttaattcccactcactccttattaccaactagccttacgaacaccagggatttgacccttgtgtgctagttcacggaacttaatccgtgacattccaaacttacgcatgtaagcatgtggtcggccatcgtaacgatcacggttgtgaagacgaaccgcactagagttacgaggaagtttggataaaccgatgtagtcgcccttcgcctttaattctttgcgcttttcagcgtatttctttactaaagcttcttggtgatgtaatttagcaatctttgacttttttgccattaagtagttctccttttatattaaaaactttatctactatacaattactatttaaaattaaaacatctgcgaactcttttcattttaatattatcgctgatacttacaaaaaatacaaggattttgcattactttttgacttttcttaaccatttaattttttcgcgtatttacggtattcgtcagcataattgtattgattattatattcagttaaaagttcatcatcatgggtataagcccgtcccgtcaccatcatcttcttgtaaaggtcacggtatggcaaatcactcttatcggcaatttgtttttcctgatcgcgactatatccaatatgacggaagctagtttcagctaaaccaatatcgtctacttccaaaattagatagtgggctcgcaaatcacgctggagaggttgccagtggttgaatggctcgccgactgctccgggatttaaaaccatgcgttcatcactcccataccgtaaaaggtcatggtgaacatgggcataaatggcaatatcaactggttcgccagcgacattaaacagcttatcaaaattttcactaacttgcgtgggaaaaaggtcttgacccatattaagccacggcaaattatgagagatgccaaaattaaggagacccacgcgtttcgtaacgtgcatcggccaacttgcaatttcatcaatcattccgtcaggggcatgttccgcaacatactgggctaaccgtgcaaagtaaatgtgggaaggacgctccatatccatcatcccgcgagcgccacgaacaactaggtcatcccagtttcctcgtacaattactgttggcttcatttcttgcaaaatctcccaaattggttttacacttgggcctggcatcagtaaatcaccaataaaccaatattcatcaacatgttgcgctatgctatcgcgatacattgcctgcaacgctgttagatttccgtgcgtatctgaaaagactgcgatcctctttttcacagatgatttcccctttcttaccttcattaatatattagcaaattttcgaaaaggaatgctaaattaatttgtattttcagaatgatttcccacattacaaattattttgttacaatatacttttatgaacaaatcattttaggagatgataatcaaaatggattcggaagtcgcaagaggaaaatttcctcacggttggcaccgaactttttacaccctctggctcggcgcgttcatcaccgggatgggctactcgatgacgatgccgtttatctcactttttattgcagaattaggaaattttacgcgttttcagctcaacatttactccggactagcatttggggtgaccttcattagtcaagccattgtttcaccgttctggggcagtctggctgatcgcaaaggacgaaaactgatgtgtatgcgtgcatcgggagtaatggcttgtacaatctgtgcaattggatttgctcaaagtgtctggatgattattggcatgcggttccttcaaggagtcttttccggctacattaataacgctactgctttaatggctggcgaaacaccgcataataaatcaggctgggtaatgtcagcgatgactactgcgggggtggccggcaatttggttggtcctttgcttggtggtttcctatcagaattgtttgggtaccgaatcccatttttcatcaccggagcactaatgttttgtgtctttctcagtacgtggttattgacggtagaacattttaccccgattaaaaaagaagcgatgaagccaatgaaagagataattcataatctggataatccaccattgatcttcgttatgttcttaaccacaatgattgttacttcttctaccatgtcaattgacccaattatcagtttgtatgttcggcaattgatgggcggccacggcaatattgcctttgtcgctgggattgttgctgctactccaggactaggaacattgcttgccgcttcaaaggttggtcacacgatggaccggattggaccagaaaaagtattacagattgggattctcacggcctttatcctctttatccccatgaccattactaagtctccatgggccttggcattttggcgcttcttgcttgggttagcaaacgcggcgttaatgcctgctacccaaacggtcttaacccttgacgtcccaaccgaagcattcggccggatctttagttacaatcaatctttccaggctgcgggtgcggtgttagggtcaattcttgggtcattcatttcgggaatttctagttatgaaatggtctttgtcattactggtttgactctcctgcttaactttatcttggtgatgttggttagaccaaagaagcaacttacagaataacttaaagaaaagagaaaatcatggttcaaacaaataaattattaaatgaacacgaagtaaataacttattttcccgggttgccccccgctatgacttattaaacaatgtgattagtctaggaacgcagaaaatatggcgacacgaactttttaaccagcttcaaattaagcctaccgataacgccttagatgtttgctgtggaacgggagacctcacaattgccctggctaagcggatctctgctggacgagtaaccgggcttgattttaataaagaaatgttggaaatcgctaaagaaaagacaaagatgattggcaacctcttcttggtacaaggggatgccatggcgttgccgtttgatgacaatagctttgatatcgtcaccatcggctttggcttacgaaatgttccagatgcagataaggcgctcagcgagatttaccgggtcctcaagccaggtgggcaattcgttagcttggaaatgtcgcagccgaccaatccaattattaaagtcggctggaaagcttactttacggcctttccattgatggcttcattagctggtggatattaccgcgattatcaatatttaaagaaaaccagccaacaatttgtctccgcccaccaactggcgcggatgatgaaggcagttggatttaaggaagtccattaccaaccattgaactttggcgcagctgcattacattttggcgataaatagaaagggagcgaggtagaagtcactcatgactatctcgctccttttcaaattattaaagaataatattgacaacattaaaaactgattataatatactggcaagcaatttaataaccgcaatgaaaagatgagtaattgatggtcgccttctccagagaactgcggatgatgggaagcagcgttggctaagttagtgaagatggtcttggagcgataaaagttgtgagctatttgtaagcagcttacgggttggtgtacgatataacacctgagtattccctttgagtacttgtagagagtttggctgtgaggtcaagctaaaatagggtggtaacacgctatcaatgtctaatcattacgcgtccctagaactaacaagttagttctaggggctttttttatttcacgaaaggagtcactattatgactgaatttactaagagaaccacatcaccatttcgctttgatattgttggcagtttcttacgcccaaaagaattaaaggaagctcgcgctaaatatcaggtgggacaaattacgaaagcagaattaaccgcaattgaggataaaactatcattgacttaattaagaaagaagaagcagccggtttacacgccgttactgatggtgaattccgtcgtagctggtggcacctcgactttatttggggattggagggaattgaacagtcaacttctaatgcaggatatgagtttcatgatgaaacaacaagagctgaaacggcaaagttagtcggtaaagtaagcggaaataatcatccttttgttgagcactttaaatttacacgtgaccatgttagtactggcacgcaagttaaacaaacaatcccttcgcctgctcaagccttctttgaatttttgtgcccagaaaacattgctagcgtcattgaactactcccacttagctaaacctacggtttaatgcttgaagtgggagattctggaaacatcgcatacttaccctaccgattctgaacgaaccttcaagcagaggttacgactattaaccaaggctcgtcccgagcctaactttatctatcggatagctaatcctttttgcaagatgacttgtgcagcgttaatatcacgatctaaatgtttaccacagtttggacaatcccactcacgtaccgctaaccattccgatttattcaatcctaaccgatgattattcttcccacaattagcacaaatttggctagtatatgacggattgacctgaataagctttttaccgtaccagtcacacttatattgcaacatatctactaattttgaccagctagcgttagcgattgctctagctaaatggtgattcttcatcattcccttagtattaagtttttccaacacaatgatgtcgtactttttgaccaatttagtagtgaatttttgtagctgatccaaccgttggttggcaatcttttgtcgatacttcgccaccataatacgagctttctgataattcttaaaatcatctaattgccgtggaactaacactttattatgatgatcccaggcgatttcctgctgggcctttaagaaccgacgactacgcaatttctcccaacgatacaactttttatggtatttgtcttcaaaatgattgattggttccttgcatccatctgaaagattaagtaatgacttaagtcctaaatcgccaccaatatatttacttgttttaggaagagtttggttttcgctttccactaaaacagtaatgtaatattgaccagcaacgttcagacgaacagtgacattcttaattttacccattggcaatcgaccagctctaaaatagacgataccaagttttggtaactttatatgatggcaatctaaaactttaatattgccattaacgtactttgaattgtagctctgagaatattttctggatttaaatcgagggaacttattttgacctttaaaaaagcgttgaaaagcatcggctaaattgcgattagcactttgcaaagcagttgattctgcttgtttcaaccaaggatactcaaccttaagttgtttcaacagattattcatcccaaaggcattcaaaaatttagcttccggattattcttgcgccgtttaatttgcatattaagcatttgattccatacaaaacgaacacaaccgaaggtttgccagagctgatttcgttgtgctgaatttggatagatgcgcattttaacggcttttaaaaccattattttctcccttgactttcaatatatcgttttaaaacttctaaaggcgctccaccagtgctaattaagcaatagctttgtgtccaaaaagctgatttccaaagatactgcttgatttctggaaattgttttttaaccattctggagctagacgatttgtaagcatttaaaaatttagccatttccgtatgaggcgttgctctaaacaaaacatgtacgtggtcctgatcatgattccattcttgcaaattaatgccgtatgcttgtcccacaactacaaaacgatgtttaagatattcagatatttcatcgttaattacttttcgacgatacttaaccaccattaccaaatggtaattaagtaagtatactgaatgctgatttctatctaattctattgttatcaccacattttatagatatatatactaaatatatcatagaacaaagaaaaagcactaacgtgctttaagagagcgattcatcccctacttatagaagtgggggtattctcgcaaatttatggataaatgagacctttgaacaaatctcctttaactctgctttcttttaaattagcccaatcgcaaacgttacgacttgaaccagtgagccaattaataatattttaactgcacatggaaatgtctctttcttaacttgcttagcaaataacattcttgtttgcttaaccacaaatgggataatcaataaggttaacaagactgtccatggtacgaaatgaagaaccgcggcgaaaataatagctaaaaatgctaaaacgttcttaatagcaaatgcatatagaccatttttctgcccaataaagtgaataactgtatgacggcgattgtcttcatcttcacccgcatcacaaatattatttgctaataataggttggaaatccacaattcatccggtaaagcaacgagaaagacgaccccgatatttgcccaggaccatgtaaattgctggccaacattaataaagacagaaataagggtaatcatgaaccccattgtaaatcccgaggcaaattcaccaactggcaaccctgacaaaggaaatggaccagaagagtaaagaatgccgatcgcaaaacaaaagattcccatccatagtaacggaaggccaacacgagtaactagatagattccgattaagccggctactatactaaaggcaagcaagagaccgagaactaaacgcggtgaaatattttcccgcccaataatatttgtatttttcttataatcaacggtatcaatggcatggttataatcattataattatccatcatatcaaccgccatattgaataatagcattgcaatgaaaaacagaactgaatttagtaggtttagggaatgataataatagacactaaggcaaaccccgaggagcatcggtaagatactagcagttttggccttaatttctactaattccaaaaaaacatttaacgacatttagtaaattttcctttcataattccttagttgttcggtacaatatagatggtacaccataacaaaggaattatcgattaatgaaacaacattttttccatacctatccggcgattaataacgctctaggtaaagtaaatcaaacaattaatgaccggattacaattaaaaatacccaactacacgatgccctacaacaaatggcctcaaatggtggtaaataccttcgcccagcattcttccttttatttgcaaatatcaatcatcaaactgccgatgagcaagaaagactaattaaaattgcctcttcactggaggttttacacatggccactttgatccatgacgatattattgatgattcacctaagcgtcgcggagccgtcagtgtccaagccgcttttggtaaagatacggctgtctatacgggagacttcctttttactatcttctttgacctcctcgtagaaacgatgaccggatccccctatctgacacgaaatgcccggacgatgcgcaaaattcttaccggagaactaggacagatggataatcgctttgatcttgaccaatcattactcgattattatcgcaatgtaaacggcaaaacggctgctatttttagtcttgccgctgaagaaggagcctattttggtcataatgatcgtcggactatcaacttagccaaacgaattgggcaaaatatcgggatcagcttccagatactggatgacatccttgattattcaggggatgaacgccttaacaaacctgttttggaggatttagcaactggtgtttactcccttccccttcttttaaccttgcaaaatcaccggcatgaattagaaccgttacttgcaaaaaaacgccaaatgacgattgaagatatggaaaaagtccaaaagattgttgtcactcatggcggtgttaaaaaggcgcaagaaattgctactaagtttacacaaaaagcgcaaaccgaaattgatcaattagcagataagcatacccgaaagatgttgaagttggtagcaaagaagttattgacgagagtaaattaaaaaagataagactaaggaaattccatttctcagtcttatcttttttattcttgaaccaagatctcaacatcccacgaatcaagcatcgtttcaggaaaatcgccagtcaaaaggtctcgatatcccttttgaaattctactggtaatggttgtttaccctttcccatattaaggacaaagtaaatatcctgacctgctgaattttggcgttttgttatctccaattctgtttgctctttgactaacgcggaaaggtgcacatcatcaacaatatgcataatgatcttacggagactagcatggtcaaggcgactaccaacataccatgctttcccttttgaataggtattctcggttaccgcgggagtccctgcataaaattcactagcgtatttagccaggacatgggctccattaaggcaaattaaatctgctattaaatgtccagttagttcattcccggtcgtcattgctaatttaacatctttatcaggaaggattgcatcgctttcttcaacccacagccccattacatcttttaatggtccaggataaccgcccggatagatattatcggattcatttaccattccggacataaaactagtaataaaattaccaccgtttgcaacataatctgtaatcttcttgcctaagccatccttaaccatgtaaaggaccggagcaactacgaggtcatattggctaaaatcatcatcaacggaaattacatcaatcggaatattcagctcataaaattgccggtaataattaagaataattggtacatattttagggcctgggtaataccatcgacatactcaaaagaccagaaattactccagtcaaagataagggccacccgcgctttagtctgagaatctttaataaccgggcccacttttcttaaatcatgacctaatttcgccacttctttaaatgcccgggtatcagtccggttggcgtgactaatcacagcaccatgaaacttttctgatccgcccagtgcctgcttcaactggaaaaattgaacagtatccgcaccatgcgcaactgcctgtaattcagtggccgccatctgtcccggacgttttaatgggctatatggttgccagttaacttgtgatggcgtggattccatcagcataaacggctggtgctttaaagaacgcatcaaatcatataagaatgctggctgataaaccggtgcatcataagacggataactatcatatgatataatgtcttgcgcactagcccactgctgataatcaatcattttattgggcagactatgaaagttagtagtgactaaggtcgttggatcatacttttcaatgatttgcttttccatcttaaataaatcaagcatttgggtcgattgaaaacgtaaataatcaattgaaagtccggcgacaattgtttccgatccttctgggccccatgcatcaccaagttcattaggcacaacaatctcattccagtcataaattgtatgactccacacattcatattccatgcatgattaagattatttaaggtttgatagcgcgccttcaaccattgctgaaattctgtttggcattcttcacaataacaattgccaccatattcattattaacatgccaagcaacaatatgcggattatcgccatatcttttagcgagctgttcaacaagatttttcgctaagcgccgataatttttactgcttgggcaaaagttatgccgggcaccaaatacatggcggcgtccttggtagtcgacccgcgcaacatctgggtatttcttgaacatccaagcgggcatcgcggcggttgaagtggcaagaacgatatcaaaatcagcagccgttaattctttgataattttatcaagcttggtaaaatcgtattttccttcctgcggttcaagcaaaccccatgaaaaaacattgatcgtggcggtatttatatctgcccgcttaaatactttaatatcttcagcccacgtttcttctggccactgttcgggattatagtcgccaccatataagaaacgaggcaattctttcttcatcattatctcaccttatttaaattctactgttactaccttatcaccatgcttaataagcttaccgggagtaaaaccagccgttgcttcaatattatgtggttgcgcaaagaaagtaattacccagtcttcgtaccctctttgtctaatcaattcacgatcaaagtcaaagagtagctgcccctttttaacgatttgaccgtcattataatgggcattgaagccttcaccacgcatgtttacggtcccgacaccaatatgaacaatcatttctaatcccctgtcagaagtaataccaaacgcatgacgggtgccaaacgtaaagttaatcttcccgtcaaatggggcgtacaatttatcgctagttggcctaatcacaaagccctttccggggaacggttgaccatcacgatcgacgacttctttcattgcaactaattcgccatctgttggggcataaatcgtttcttctttaagaccagtcgatgatgtcgacgcttcacttgtcagttctccttgtgctaatttatcctttaattcttcaactacttccgcatgaacttcttcactcaatttcaccttaaaaagaaagacaaaaattgacaaaatagctaataccagcgggatatagaatgccatactatcgaaagtccgaatatcatgacctgtcatgtcagcagcagtcgcgctccccgtcattccggctgcgattgcgatataaccgacaaggccatttgagatcgcccctgttaatttatcaatcattggtcgcacagcaagaacaaccgcttcatttcgttgaccagaatttaattggccatattcaattgcatccgttaatgttaaaactgttaccaattgggcaaaattaatgttaaacaagaccaatccaaagtccatcattaaaacattagagcgggcaaaaataaagattaaatatgctaaactcatgcagacttggccaccaatgaatagccattttcgtggaataaatttattcaaaataggataaagaggactagtacagaaaccaataatcgtagcgatgaccccaacaatccagaattcaccaggtttaccaataacaaacttgtaaaggtagaaaaggacaccattagttacaacataggcacatgaataaagtaaatatgccaaacttggccataagatttggtcattgtgaaaaattgctgaaaaaacttcccgaatagttgtcttatcctgggcagacttacggatcacattgtaattttctttcgtcccaacacaaacaaccaaggcacagataacagctaatgccgaaataatggcagcaaaggcaaaccaaccagcaggcccctgccgatgatgaccagtagctaaataagtaaaggtcgttacaatcggtaccacgataatcgttaatccattccaaccaagtgttcccgcaaaggcaccgagagcggtataaacgccccgctcttcagaatcttcacttaaagcgggcaccattccccaatacgaaacatcagaaaattagtagaaaatatcaaacgtaatgaaaataataacaaataaaatggcaaaaagaacccaattatattttgctaagccaaagattccggtaaagaggattaatagcagaatcgcactaacgatatttcccattaaaatccacggcttaaattttccccaccgacttttagtattatcaacaatatttcctaacagcggatcaattaataattccaaaatccggacagaaacaatcaaaccagtaatcaacccaattagtttattagcaaccgttttgtttagtcccgcgaacattccgcttgttacaaagataataaagtaagtactcattaccccataaaatgcagagtgtcctaagttaccaaagcaaaacgaagcacgagaaataagctgcttccccgtgagcttatggctatgtgtcatatttataacctccaaactacagctttctgtaatcgcttacaaatatattataattctttagctgatttgagtaaacatttatttaaaaagtaaattcattactagcgaagatataaaaaagtagctaatccgtgaatcgctgatacgaatactgattagctacttattttctttgggaaagcttttacgaaaaacaatattggtatttactgtcagatgaacgtgcggacgctgggatgggttattaaatcttggagaaggttaatcgccatccgactaagcgtttcttggttgatattgtatgacgttaacggcggtgaaacatacttagcaactttactgttattgatgctaatcacgacagtatcacgtggcacaattacccctgcttcattaaaagcctggagaacaccaacacttaacgtatcagaggcaataataaaggcttctggtaaattaccaccgctttgttcaagaacccgtttaccaagttgataaccgtttttaacattaaatggtccgtccacatataatggcgcttcttttatcccttgcatccctgtaaattcacgaaaggcgatttcacgggcatcagcttgttggacgttattgagattaagtccttttccaccaatgaaaccgattcgttcataacctgctttggcgaggcgatggagagcatcctgaatcgttaattcaaggttaggttgaacggaatcaaataattgtggcatcggatttatatcaacaaaaactccatgtggtaagtattgatgaagttcgataagctggtcctgcgttacccggtccgcacccacgccaataaatccttggaacgaatcagccgccgcaattaaatctttgatattactaaagatttcaacttgcgctcccgcctcatcgacttctttaataattgcattgcgcaaaaacgcaaaatattcatcttgcagttgttctttaccgcttacccgatacaataatgcgaggttaggacggattggttgctgctgagagtttttcttgtggttgttccaatagccaagctcgttagccaccgtcatgatcttattgcgggtgcttggactgatcgataaattttggtcattattcaaaaggcgcgataccgttgctggtgaatatcctgatttttccgcaatttctttaattgtcgccatcattttcacctcttttagtaatgggtttagtaaatattatacactagtttgaagatagagatgataattcaatctactaattttattcttaattattttcccttgtttatttcccttaaaatgatcataattaagaggacgagatttattgatgaggagatttacattatgaataaagtttctaagggcccttgtactcgctcttgccggtattactgttggaactagtactggacttagcactaccctttttcaatcaaccagtgttgcctatgctgctgagatgacaaaggaaaaaatgatttagctaatcgttatattgctgattatttaggcaactgtcaacagtatgagcagaatgataaaacattcaaaggcttttcttcaatcaaggatattacctattcgcgagacaataagattaaaattgacgttaatgatgacatttatcaattgcctaaagcacgtcgttcacttttgattcaagatttgcaaaacggtgtgtacggcacattagcagacaacgaccttaagaagttatctgaaaaagacattcaaaagggctgtccaactactgtttacttgaatggaaaagtaattggccacactgccaagaatgataaccaccacattatttgggataaataacaaaataagagatttgggacaaagctggtgttccaaatctcttattttcatttaaagatcaatttctagaataattggcgtatgatcgcggcgttctccactatcgatcattcccgcttctgtaatcttatcagcaagccggtcactgactaaccagtaatcaatccgccagccagagttattttgtttgctggtaattacccgttgtgcccaccaagaataaactcccttttcgtcggggtggaggtgacggaaactatcagtaaagccagcagctaatagttttgagaaatgcgtacgttcttcatcagtaaatccagctgaatgatggttggttgctggatgagctaaatcaatctcttcatgagccacattaaaatcaccactagcaattaccggtttttgctggtcaagttcatgcaggtagtctcggtaacaatcatcccacgtttgccgctcatctaaccgtttaagcccattgccggaatttggtgtatacacttccgtaacatagaagtccggaaattcaagggtaatgattcttccttcatcatccattggttctggcgcattaattttaggataagttactttcggctcatattgggctaaataaaggtacatggtcccagcataccctttccgtgctggctcaacggaacttcgccatgccacttcataattggggaataattcttgtaaaaccgttaaatgcttcttagttggcccattctttgacaacttggtctcttgaatggcgatgacatctggcttcatcgctgcaatcttttttaatacttcccgcgtttcccctgcccgtacggaagttccagttagtgctgcattaattgaatcaatgttccacgaaataaatttcacagctatttctcctttttatttcttgatttaaggtcgctttctttgatgaataccccatcggcagttgtcttacccgttcgctttgcaatttcttgataagctgcggtaagtgcttgttgatggtcaacacccactaatttacaaaagattagcaatgcaatctgtaagtccccgatgctatcgataagcttagtccgattttccttattatacgcactcgaaagttcgccgagctcttcagccatcttcataaattcgacacgtggatccgcgtggtcaatcccacgttcatgcgcccacttatcaatttttgaaatagctcctcgtaattcatcaaatgtcacctcatcaagtgataattctagtcttaactataaaataaaagaactagctacgcaataagaaaatttcacgtaagccttcttaacagtatttatcaatcaccgctgttataattattgctaagggaaggaagtgaaagaaatggacttaaccaattatcgaatcgatcctgctaagtttgctttagcttgcgtgcaaagttcacctgatcttaccactgaagacaaattaagggtttacaaggaagtatatgaagaagcgcttactttctatcaccaaattcaaacagccgttattaataaaggtcgttcaaaggaagatcgcagccttaaggaaatgggagactttttcgatttaaagaactaaaccaatcaccgaaatcactacctatcaaaatctcccgtactacattgatggtgaactactcggccataaatgaccgagcttctgggaacacgaagtagtatttaggatattacacaagtattcttgctacctaacttacagaactccgttcttttaccaaggctagttcctagccaacggcttttaatcctttttgcaagatgttaactgccgcattaacatctcggtcgtggtgaacgccacactttggacaagtccattcgcgaacttcaagtggcttcttgccactgttaaagccacaatgcgaacagatttgactggtatagtttggtttcaccaagactagttgtttgccataccaagcacacttgtattccagcatcgtccggaactgataccaactagcgttagcgatcgacttcgctaagtggtgattcttttggagattcttggctttcaaatcctcaataacaatcacgtcgtactgcttaactagagccgtcgttagcttgtggaggtaatccttgcgcttgttggcaattcgttgttgataatgggctttaacaagtcgggcgcgttgccagttctgataatcattgagtgctaacttggtatcttggtggttgtgattccattggcgaacggcaacggttgcccggtggcgccgcttgctgaatttactttgccacttcgttacttgatgttctaacaatttagcgttgaaggtaccgtacttgacaccatcagaactaatcgcaaggtcggccaggcctacgtcaagcccgaccatttgccccgttttcggtaaccgttcaacggttgtttcaacttgcagggagaggtagtaacgacccgtcgggtcataactgaccgtataacgcttaattttggcctcaccaataagagtcgttttactcgtgcgtatacttccgagttttggtaattgtaaccgccgcttggcaagtaccttgcacgttgatcggccagtgtaggcctgataggccacatggcggctcttaaagcggggatagccaccttggtgcttaaacaatcgtttaaaggcctcggtaagattatggttcaccactaggaaactggtggaatcactttccttgagaaagggatattcacgcttgagctgtttcaagaggtagttcataccatactcattgacgaagtggctactgggattgttttggtaacgctccttagccatactgagcatttggttccaaacgaagcggtcattaccaaacatttgccataactgatcccgttgggattggttagggtacaagcgaagtttgatccctttaatgaccttgttcattctagttccacctcctttttccgttgatcatcaatgtacttggcaacggcttgttcattaacggccccaatactttcaacatagtaactgggcgaccacaagtgacggccctcctttttccaatagcttcgctgtaattccggacattcccgaaatagctgataggcagtaccgcctttcagccaacgaacaatattcgtcaccgataatttgggtggtgcactcactaacaagtgcacatggtcgtccttcccaatttccatgtgggcaatttcaaagccatatttagcggcgatctcatggataatccgtttgaaggcgatctcgacccgaccggtaaggactttgtttcggtatttggttccccaaataatgtggtaattaaggttgtagaccgatgttcggccatatgtaagtctgtttgtatctttcataccaacgattataccataattcacgtttcccatatacgcccgtcgggcgtaaaaaaggggggcaattcatcacgtccttaaaagaacgtgtttccttgccccttttcaaaaatgtttttttaaaattaatttactttgactagggactgtgacataagttaagttactttcataaaaagcaaatacgcagtacaacgatggcctctaacgtccggcaaaaccgatcgttagaggcctattgttgcttgcgggggctccagaggctagcttcgcgtcgaaaaacgaagtcacaagtgacttttgtctcgctcccctttcctacgattagtcaagaaaaatatttagaaaagaagagtatactaaaccaaccctaaatttcaagaataagttagccactggactcaaataaataatactgaccaattgattattggttgatggagctgtgatatctcttggtagaaggccttacgatagatatccattgacgaatgtccattaaacatagctcgtggatagtgattcatccaatcattagtcgctatgatctgagcactactatagttatttatagcttcacctttggtaatctccttgcggagaaaccggttattgatctcattggatccacgttcccaaggggaatacggatcagcatagaaaacatgatcgtgaacttgtgttaactcactaaattctgaaccgttgtcagaggttattgtcttaaagatgcgatagtaagcatctgtgcccattttctggcgcaaatttatgaagaactgatttactgcatgcgcagttttaccagcaattttactcgtgatattaactcgtgaaaggcgatcagtcattactagtacaacactgtcattaccgtttttctgtccctgaactgtatctagttcccaatggccaatttcggaccgttggtccgcagtttgaggtcgttgagcaatattaggccctaagcaccttttagcttgcggatgagttcgatgatgcttacgtttaggcttttcaaagaggtctaaattggacgtacgaagcacaccctcattaatccattgatataaagttacaaccgactttgggatcagggtgccatcattcattaaatctcgagccttataaataaccgcttgtgggagtaatggtggtcgtcaaactcaccaagcattagctgatcagctaatcgtaaaaattgctttgaagaataatataagcgacgacgaccagaatggcggtgatgttcaagatatgtggcctgaccagcttcataactatagatgtagtaagaatattcgtaaatcttaccattagatttttgacgacgaagttggcggaccgtaccacggttgagctcgttattaattgtttgatgattaactcctaattggcgaccaattgcgcgattggaaagtccttgcgactttaaagtcgcaatcatcacacgttcttctttagtaagatgagcattctttttatgagtagtcaataaactagtagacatggtatcatttaagtgcgtcatttgacggacatcctttcatataggtttggttcacttaatatgatacctgatgtcacgccgaatggcgttttttatttaccaccaactgggtggctaacttcattctataatccaccatactaaaccaactcggttcttcttcaaaaatcgagaattagtggtatattaaaattgtgaggtgattatgccttcacagggaccattgagtccgtataccgatagtagtatttttcatggtgcttaatcatggataagagacatttcagagttttattcatacaagctaccatggcgaccttgttcagttttggatgaggtcgtttttcttttaaacgatagtaatagtcaacgatatgattagaattagcgtgttgttggcggatcatattacctacagtaaaatataagagcttacgggcaatcgggtttccacgcttattaatgtgatcttgacctaaataggttccagattggtaacgacgaatatcaattccgacaaaggcattaagctgattggcattgtcaaagcgactaatgtcgcccaattctcccattaactgagccgcagtttgtttcccaattcccggaaaagagcagtataggatatactctggtaagcgctgggcaatagattccatccgcttgataacctcttcccttttacgggttaaggcaattaattggcgagcatagtagcgaacttcatcaacctgaatggcatcaccagaaacgccggatatgatttttgggcgagatcgattaatcgatcggcatacttataagctttcatcttagatattcgtttatctgtagatgccattagaatattctttaatttaactctcgaataaggcctaactagtgctgaatgaggaaaaagctccacgatattcaacgctaatttagatgttctatttacaaataattgcttaagttctggaaaaacttgttcaagtgcagtatgaagatgatttagacgatagttccaatcagcattgagctgattatagaaccgactaagctcatgtaactgaagatagtcttttttccaaggaactgttaatcgaaaagcattttcctggacagtgagcgcaatccgatgagcgtctttctgatcggtcttaactcgtcgtagactctcggactttaaatgaagttctagtggattaagacggcaaaagcggagaccattggtctcacagaaatgttcaattactcgcgaataaattccagtcgcttcaaagtagataattggcttctgagctttcttaatcatatctcgtagagcattaaaccccgctttcgtgtgtactaaagaaaactcctttaaacagtgtttccctcgataccagacacagtagcttttccccattgaaacatccaaggcaaatatatcagccataaaaagacttcctttctataaatagagctagatataaccgctatcctagatttgtacttcatttcctaaatactcgaactcgtagtttcacaacctaaaagcaaaatatcaaatcaaagatagcggagatcattttataatacggactcgaagtccctgggagcatgatcgatcttagctctatcttcagaataacaaaagagtccaggacaataattatttttgtcctgaactaatcttaggttgtttaatttaaaacaaaaaaagaacccttgatacataagggttctgcactactagttgtcgcgacgacgttcagcgatacgagtagccttaccagtacgttcacggatttgctaagctgtttcatctgctattcatgaagtattcacagactattcaattagttaatttaaataggtagaaactcattaactagtcatgaagtattcataaactactcacaaaaaaactaccaactacctaccagataattaacggcatctcttaatgaggtgtcgttttatccataaatttgcgagaataccccaacttcgacaagtgggggatgaatcgccctctgatatgatataattcaactaattaaactggttctaatgcatcgaaaataaagctgttaacattgcttcaccatgaggacactgagtaatttcgtatagagtaacttcgagtttgtgctgagacaacgccacgagttgcaatcaggctaaaaatagctggcgaaaaccaagccagtatgtattttgaacacgtacttaggcggtagtccgatgaaactactaggcccgggacgggccttggtcaatagtcgtaacctctgctcgaaagttcacttagaaccggtagagtaagtatgcgatgttcccagaatctcccacttcaagcattaaaccgtaggtttagctaagtgggagtagttcaatttcattataactccgatataattttcgcgctaattctatattaaatttaaaacaaaaaaggatgccgattaaggcaccctgtttaccggtacggattaagtaacgaactgaatccattttgcatgccggtacttctcatctgatgtgtatattatagcataaataaattatggtacaatactattgcgtgtcgggagtaacgacccaaacttacgcgcaaaaggggtgaattcccctatgaagtttgtacttctcattctgatcgtgccgaacgggctcgttaagcaactactacattctgtaagggttgcaatcaaaaaggctctcaaacacctaattgaggaactacttggttaaactccatttaattccaaaaggaggtgggcgagatgctatttcagcggtggtaattcgtttactatcgctgtttttattatatatcaaaaaagccctagcagtaattgcatttaaaagcttgcaactactactaggatttttttctacttatttaaatgtgccaaatggttggttattatttgcatcacggcaaacaagataaccatattgattatttggacgtggttgacgtaaccacacgtaaccatcgtgacgagaccatgcatcatacttaatctcactattagctggcaatgtagcaattaaggcactatttgtcttagcgccccagcgtaagttaattgctgtaccagtaataaaagtacctttctcagcaaaccaacgatcacccatatcatcaacccagtgattggatggaagctcagttgtaatagctggcgtttcctgctcaattggtttatttggttctggcttcggtgcttcacttggattaaagagtttaatagcattgtcagttaatgtaatagaaccatcaacattgtatccaagcagattatctgtgtgttgccacatatcaacataatttgctgatgggaagtaattgaagtcaggattctttccggctgctttcccattagctaatggatatgccgctaaccagaacatatccatatttggatgaattgcttctaaattaaagttaggcagtaagtacttgtaagtatagaacccagtgtggaaaccagcgttccgaacagtattaaggaatgcaatcactgatgatgttggcatgttagagatttcagcatctaaaatcattaacgtaccaggttgtacattagcttgtgcctttgagttagcaataaagtagtttgcttcggccaccgcttgcgcatcattatggaaacgaccaaagtgatagaaagcaaaccctttaattccaccgccagcacttcgatcaatcaaagaacgaatgtatgggttaacataattaatactttcagttgtcttgataatcgcataatcagcgccaatagccttataatcatcaactgttaaatgactttgaaaacttgcaaggtcaattactgttttacgttctgtcatattatttttcctccttatttcctttataatcaccggttatcttatgaaaatcagctggattgtagtcatcttgagccttagcgacattaagtactttggctaacgagtcaatgattggtgacaaccacggaacttgtatgtccatctgatttaaattttcgacaattgataccaagtattgatagcagaatgtcaataccattacttgtgcaacataatcaaaaccgattgaaattagatatggataaaaagcaagcactccaatcataaggataaaattctttgccaatccatatgtccctttggtcgaatttgttcgagtagctgtgtgattgctacgtaagcctttggcaatccccgatccaatatcaaataacacaagcaaagtaaatccaactattaatggatcgtcaatttgcttggctgcttgatgtaatgctacttcatgataaggtagtgccattaataataagtgcattaaatttcgttcccattccctttctaaatgccgcccataagaaaagccctgaattcggtattctttaaacactaaattctagggcttatttatgtattgtttatttccgaaaggcgacaagtgcctttaactattcatttgttttatctgctgtcttatcagcagaattggcgatttcatcctgtgcattatataccaagttttgaaaatcttgagtatcttttcgtactaccttcttgttagcatcgtacaactctttattggtgatgaaggtattaaaagtatcattaccagcatcgtcatcaaatacatttgcagtaaagttagcgattacttgaccatttactgtggactttcctgttaaggtgattgattttgttgattctaacataattacttatctcctttttcatcgttttgcttcttaagttcttctaattgtgatttcaattgactattttcttgttccaattgagtagcttttgcttcccatgaggcagctgtgtaattagcaaccgccaatttttggttaagactttgagctactaagttcatatcaatattgttcattattaaaaactcctttaactattttcattcgatcattttcgtaccccttacgcttagctttgatttcccaagcaaaatgaatattagggttgctagatttaactgtaaaattatttgctgaacgtgaagaaacccacacgtttccattgccatatggcgttagaaacacttggtatggcaccaatgtattaactgtttctaagaaataaggatcaatcatgacagtaactacaccattactattagtttgtgtttctccaatatcgccaaaataatattcggcggtttcataggcgttaatggctgccatccctcgcgatgttggtacaacggcattttttgaaccagtaacagtaaaattcccactaacattaaaatcactattaaccccaggaaataatccatttaacgataagatacttttaccattagctgtaatattaattgctccatcactattaatagaaaaataatttttcccatttaagcttcctacattaacaaattcatcttgtaatgttattccccagaaaagccactcgatggtccttgaaagaaatattgtgagaaagtaccttttaaaactgtttgaccattttgatatgttccatccaacactaaattaggtattgtttttaagttattattttgaattggttcaccagcataaagaaaaagttgcttttttgcagcgatatttataaagccatcgcttttaccggcaataccagcaccaataatttcattcccatttaaataagataatgtttgatcgttccagccatgagttctaagtagaaatccatccttaccttctatatctaaacctgatgttccaaaaaatacaatgttatcactcttagtaatacttccataatctggatctaaaacagcatctgaaagagattggcttttgtgaagatacaagcctccatcaaaaaggtaagctccacttgaattaccataagcgctaatagaccctcttgaaatccaaacattattaccttgattgtcataatcatgaattccgtttttatctatccaggcattatgatcaccttgccaaacgtgaagtgctccgctatctaaataaaattcaccattgctacctcttaatgtcccggcagtaatgttatttgcattcaggttgatgacattgatccgaccggcatctagtgttccagcagtaatcttgtcagccgaaatgttagttatagccgcatcggggataaatgctttaccagaaaaaatagttgaactggcgtccatgtatatcttgtcattttgaattaaggtggtgccggctgacatgttgatttgagccataatatttccgccagttacggttcgttgccaactggtccaattatctccaattagtaatctcgtatagatttcattttcattgttgtctcgttgccaagtctgcttaatccgttttacatctggataagctaccacttgaagataagcccacgccgatgaatcaggagtattgctattaggtactgcttgaatccaatagttaccagtcgttttgtaattattagcatcaattgcagatgtaaccttttgccaggctgtttctttgcgtaaggaattcagcgacacattaaagttattagcctgctgatttatttgtgtctgcagaccacctgttttgtcagatacttcttgacgaatggccttagctgtctgactgatttgcgattgaaggtcactgtgattacttgaaactgtcgattgaaggccttgtaatgttcggttcaactcactatattctgaataactagctgatctttgccactgagtccatgaatcactaaatttagttcgtacataccttaatgttggatcactatcagcctgccaagtttgtacaattcgaccatcattaacccgctctacttttaggtagcaccaattagttccaggtacgttaatgttatctgttgactgaataaaataatttccagtattcgtgtaatcatttgcattaattgcattattgactacttgcacattggttagatgctcaagactaccaactcggccaattacactattaaggctattagctgttgatgtggttttattgtcaacgccatttattcgatcgttaagttcggtccggacagcagaagcgctttggctaatttgcgtttgaagttgcccgtagttgccactaacagttgagcgtagaccttcaagcgactgggatagttcagcaaaagctattgtgttgtcagatggagctggagaccaaggtgtggctactgagccacgttctagtttataagatccaacactaaaatttggtttaacatttggttgagtaacaaatatctttacgtcttcggtttgattcaatgtgaaaggatatgaatatctcttccagatagtcccatagttttctgtttcaatatttacgatagctgagttgtctttttgacgctgaacaattacttgcattggcccttcagcatcacccttagcattccagctaaacgtatacgttccaggctctagatgcttcttcgccatgtattgtgtccacgcataattagtgataaagaatttattgccactgctatctttttgcaaattatctgaaagagacaatctaccatcacgatcccaattatcaccactaaaatctgctgttccagttaataaattaactccaccaccactaaacattggaatggtagtttgctgaactttttgaagaaatccatcagccgtctgcagaaagcctgaattagtaagaatattacttaatccttgccagttaccatcattgcgaatggtattgattgcatcattcttagcagagttagtccggttatccgtttcggatttggtgtagtagctactaaactgttggctagttgcattaatccgtgatgatagctcagttagactgtgttcagtgtcttctggagctggcacccaatttgatggtgtactacttttttctaccattaaattacgatattcgaatgcccctggttgtggattagtccaaattgtcggtctaactattgttgtgccttcacgaaccttgtacgtaaagcttaaataaccatgtcctccagctggaatgcttttaccgccccatgccgtattatcagttccgttaaccctgtcataaaagccgacttgaatagttccagaaccattacgaacctctgcgctaattgttaaggcatcaccaactgaccacttgctaggatccagaggccagttaggtccccaagaattatctacttttgtccaattattactagtaccgggtactaagtttcttccaccaatcttcaaattattcagccgatcggtaacgctattcatatcaacacgtaagccgttagcagtagcttcaacatcaacagtttttgcataaccatttaagtcgctagccgttaactttgcagctaaagcttgattggttagattaacgaaatttgtataagtcgaattgtcaaccttacctgcaagcaagccctgcatgtgttgagcgtcaatcttgagttggttaatatcgccattggcagtgccaagagtggtttgcaatcctttgacatcaatcttagtggtattaacatcgcctgctaaattagcataattgatgtttaaccctttaaccgtgttagacacatcagcaatatctttaccttgttgttgtgcttgtttagttaaatcagcaattgaattttgagcagagatgtatttctgcaaagcatcagcaacatcattagtcactttagttaagtcaggaacaatgttgttatcgtactggccttgcagattagttaccgaatcgtttagcttttgcaagctttcatcggcaatttttttattgtcctcaatcgatttgttgagattctcaacatcggcatcagctttttgcttgttattgataatatctgctttggcttggttaagcccttgttgagcgtccgcaacctttttctttatctcgtcatcagataaatctttacgaatccatttaccggacccatcatcctgcttttcaaatatccaaagttcggttgaattaccatttttcttaaaccacacgtcattaaacttagcattagttggtggcgcagttacacttggtggaaatacaactgtcccgtctggtaatcttctaagttgtaattccttgattgtttgagtaacgctaccttgccaagagaccatttgatcagaagaagttgtctgatcagcttttgaagttgcagaaagcccaccattaaaatcaagtgtgtaactactgtttgggacaacaaaagaattcccctgtttatcttctagtcgtagccaatcccccgcttcaacagcaggattaccaaaccaattcagactgaacgggtaaaaagttatgtctttcaattgctcccaaatatcattgagccgttgtggagtcatgatattattttcgagtttaatctgagaaccagtagcatctccagcttgataattcttggtttcttctgtactctcaccatcacgagttttagtagtaatagtgacttggcattgaataccattaatcttataggcagcttcattcttcgttagtcctgcttgttcatattgactaggatctaattcatagtttggttcagaaattgtccgaatagtaaacaatccttgtcgatcaaacagagcataaccaacatacaattgagcaatccaaccaagtgctttgcggtaactttgaccagtgatcggagctgacaaatctgcttggtgcggaagacgtgctaaatcatcagtattagccttaacacctgattgagcacagatctccgcaatgacatctaatactttagctgggtacgttagtttagatacataagttccctctaagccacagaaacgatcactagcactaacagtcgtaagattattatttcggtccatcttgatttcactggagataataaaaacgcccaacggttcataaacataaccgctagatgtttttattccaatgctaggatgaacctccattcccagcttcaatccctcaataaggtgagagaattcaatctgaactgtatttgaatacgtagacccaattgcaaacgtatcaccattgtaagctcctgaatcgtacttcaaactattaatatcagttgcaccatatgttttaccatcaatcgtaactttaatatccaaagttcgctgtgaagctcgccaagcatctcgagtttcttttgattgtgttaacactaattaatcacctccttattgctcaatcagatcaaaagataaacctttccaaactggtaaagatcctacaaatgaataaacgggcgctgtccgatcaccaacataaaacgtccccgatcgaacttgcccgtctactggatctaaatactcaacattaaagaattcagccttaacagaatctaaaatctttgcgcactctgctactgttaaagcaccaaaagttaatgttatttttcttttagttgcaactcgatcacgatgtaaaagtccttgcgcatcacgggtcgcctttgcatcaatatcttgaatagcaacctgcattgtttgtggggcaggattaaccactgtcccagaaatttttagagaatacaagcatccatctcctccttaaatatttaacatatttcgaccattcttttgatttaccgcgttaattcctttgatagcatgttcgccaaatgactcatcaccaatcttaacggttaagtgtaagtcaactggttgattactgttgttagtagtattttgcatttgtaatgcttgaacgatggcatttactaggtcggtactcatttctttgaatccgccgttttgcattgttgcatcattatttgatgaagattcagcatacatagaatttgaagtaattgcattatttgagagaactgttggaagttgtaaccctccgccaaaattccgattcataaatgcaatcgcttcgttaatccgttgcatacctaattcacgattcattagtgggataaccatttcaggcttatcaccttcaccaatttcatagaagccgtgcttagaaattaagccaccatcttcataaccgtgtccgtgaccaataactgccaacattgaagaaccgtaacgatgcttagcgtaattaatagcggcaagcatgttatcgtaacccttcatgatgttgtgatgaccagggaaagcataagcattaaatgttcctggctttgtttgtaaaagaccagttgcgtttccgtcagctaaaccatcgttaccaccaatagcacgttcgttaccgcctgattcagtttgaatttggcgaacccaagcatttacataatcagcactggcaggtaagccgttcttgcgcaatgctttcttaacagcactacgccaaccttccgcacctggtccggtttgatgagttgcaccaccgaattggtcaatcaccttccgtgcccagttcatcatgccttttttctcttcgttaactgcacctttggcgagttttagtggtacctcgcctgctccccaatcataggtcacaaacttatcgacaatatagttaacgagtttttcgggatgggcaatgtcatctgtaacgttttcgagttcatccattgcagcatcaaagaatccaccaataccgctaaaaaggccgccaaagtttaaactgctaagtgctcgactaattccactaaagtcaaaattaaagctaccaatcccaccagcatatttaggaaccatgtttgctaattcgttagcggtatcagttgcagttttgaccttagtaccagccggcagataagttaagaaattacgtttagcagggaatagtccttgctcaccattagggagttcataactttctcggtaaatatcaccatcttggtcattaactaatgctaatccacctggatgattttgtgtccctgttttgtaggcgttccagttaaagtaaccccaaccaacagaaccaccgccaagcttccctaatacccagttaattccttcgcggattttatcggttgctttttgaacaggtctaaccattgcatcaacaacacgactaatagcattcctaatgctttgcaaaccactagtaataccattaccaatagtgctacctagtcctccagcccaagaacctaacgtccttgaagtgccgtctctaaaacttgaaacccaacttcctaaacgctcaccagcatttttagcagcgttataggcaccactaataccattgcctacgtgaccgcctaaattaccagcccaattatgaatgctactattggcatcattaaagaaacttctggtccattcagataatttattaccagcattaacagaacctgagcgtgaagattcagagccgttattaatatggtcacctaagcgttcagcccattggcgtacaagaccactagcagattctctaaagtctgttgtccaagatttgagtttctcaccagcatttttggccattgattgaccattttcaacactgtcgttgatgttagagccaatttgtgatgaccaactatggaccttttccttggcattaccaatgaaatctgttgtccagtccttgatcttactaccagcctgcttggcaaatttcttacccttttccacatccgtattgatatttgaaccaatcttttgcgcccaggatttaatatttttcttggcatcagcaacgaatccagtagtccaagatttaagcttattgctaccagcaattgcaagcttcttactcttttctacatctttattaaagttggttccgataccagaagcccactttttcaaggtcttcttagtgccatcaataaatccggttgtccacttaccaagatttgaactagctttttgaacatctttcttacctttagtgatattcgtattgatgtctttaccaacagacttagcccatgatgtaaagttatctaagatttcatgggacttaaagccaatcgcttcaacccagtctttaggttttttacctttgccatacttagaccaaccatcgctaaacttagcagcaccagtaccgccccatttaccgataaatgagcctatttgttgtccaatcgcagcacctaatggtccgccaaagaataagccgataccaccaccaatggcaccaccaattcctgaaccgaagctcttgaacttaatttctttgttctttgctttgatacctttgtaaatatcaattccagaagttacagcaatcatagcggttgatagaccgatacctaatttttgcccgagcttcatcggttcgccagctttaatagaagacttagccgatttaagaaagtcagttttagcgaggttagtattttgccacttcttgttaacttcgttccataaatctttaagcttaccgacaccggtcttaaaattatcaaacttaattttagctagttcttgaattttagtaattgggtgtttactaaaatcaatcaccgttcccagtaagtcatcagcatacttagcaccattcttaagcttatcaaaactaagcattgtaactattttaagggtatcggtaaagtccttaatacttgaaatagttttacctgcaactttaagactgaacagtgtcattaaagtagtagtcattactttaactgctgtttggtgatgatcgatccaatcagataagaggtttaatgcacctgttagtaatttcaatgcaccaacaatggcaaaacctgtaatctttgctaacggtttaaggaaaccattaaagaaccattcaaaaattggttcagcagctttaatcacactgtgaacaaccttcaatgcagctgctaatagattgaagaagtctggaagtagtttagtaatagtaaatccggctagaggtaacaggacattcttgtaggcccatgccaaaccgtcccaaacatctttagtaactggacgaatagcttttagcaaagtgtcaattgattgcaacagcggtgtaaagtcaagcttcttagcccaattggcagtgtaagttgccatatcaccaagagcacctaacatatcatcaaccatacctaagagcgtcttaaagattgatgttccaacatcaccatgtttccaagccttgtcgaattggtccgctaaattgccaattgtattaccaatgcctgtaacaatttcaataagatggctccagattgaaacacctaattttgagtgattccatgcttcatcaatggatccaaccatatccttaaaaattctaagtatattattaagcgcattaagccaagcttgccatagtcttgtaccgttattgccgtgttgccatgcttcatcaaaggctttagcaatatcaccaatgaatttaactaggttagtagccaaatctaagagattagcaaaaatccttttaccaagatcaccagtattccatgcttcacggaatgattcagctatgtgatggatagcaacaagaatattattcagtgaatcaaagatagtctgaataaaccttgttcctcgtccaccttcttcccatgcttcggcaaatgccctcgcaatgtcgccaataatattcagcatatctgctagcagttgaagcaagttctccattactttttgcccggtaccgttgtcccagacatgtaagaatgaattccctacatcacctaataagcgtttaatttctttccatgaatacttagcggcgtcaacaactgcttgacctttttcatcccaggcttttttcattggatcaaagatttcacctaaaacctttttaaccttattagctgcatcaatcgcattttgagaagcctctaacgggacattccagtcaaggcctggatcgccttcatcacctgctccaccatcatcaataccaggatcatcaaagactggtgtatcttgcttttgctgtggagtaaacttctctagtggttgagcttcaaaggtgccattatcttggttattcttgttattatcaagaacattaagttcatcaaagcccatcaaagaagcttggaggtcttcgtttgccttcttagtatcttcaaaagctttcttcgcttgctcattagaagctttaatccgttcgttttcagcagcaacagcagcagcaccttgacgattagcttctgcaatctgctgattagctcgttgcacagccttagcttgttcttgctgttgtttcttaactgcatcgttggctttgcttgccgccttagaagtatcgttcatcgcccgtacttgactatataagccctgagcaccacttctagcaccagacaggctcattccagttaaagcagaagtaaactgagcaagccaaccagttgcttttttaagagcattcatcaacgagttaatagctggcaaaacaaagctataaattggataaaaagcagttaacaagttgaccttaattgcgttaaagctgcttgcaaactgcttattagtcattaatgctgaacccataccttgagctaacatcatgattccttgatacaacaatgtaaatacgattaactgactagctaacatactcattgccatctttacgccttttaatcgctcacttagcattgaagcacttgtaccagccttgcgcattgaagaactaccactatcacccatgcgcctaaatgacgaggtgacgtttgaaatagtatttcgtaaccgattaagccttgaacttatatttgatgcggtgttaccttcttgagctagtgtagtgttcactcttgaagatgcgtttcgtaattcatctccacgagaactaacgtaactataagccttagctaattcattgcttcgatttataagacgtttatactctgtttcggcttctttgagtcctttattattaccagatgatctaccaagaacagcatcttgtgctttggtttccgcaatagtacgcctaatccgttcaatctttgcttccgtttgatccatctcacgttcaatacgcttgagtgaatttggaatagtattaagctcttgcgacatttcttgtgcaagggctttggcttgattctgataacgttccatcttgacttgtgcattagcaatctggtcatcaagtcgcattgctctaacctgactgccttgtttgttcatatcaaggttatctctgctagccatcaatgttgctattctacgttgcattgattgcgcctgttgcattttctcgttgatgtgggatacaagcccatcaatttcctttttagctcgggaaacttccgcttgaatttcatcatcaattcctaaatcaaccggccttttaggcatatagctctgaattcttttttcttggtagtcatcgaagcttgagttttttattcttggtctaggcttttctttaggacgtacttcttgttgagcttgtttaacaggaatatcacctacagtttcacgagctaccttagtttgttgagcaattcgttgttgcatgttagatgcttcttgtaaacgagcagtcaaactatccaggcttttttctgattcgttaacggcttctttggaactttcggcttgagccttgtttccttcgataatcctattagttgcatcattctgcacactagccgtacgctcaatagatttttgcttagagttttcagcctcttcacgttgacgaacttcttctttggctttctcatttgctttagaagcgttatcgttcatattttgctgaatacgatccaagttactttgaattttagcttgcatatcgttagtcttttgaccgatgagactagtcaactcatccattttctggagtacatctccataattagcccgaaaccttaactcaagttcttccaagtccattactattcacctcctcctttatctttattaaattgtctaatccgttgagcttgttgcataagaatagcttgatctcttttccaatcgggttctttttcagacatttgctctatctggttcatatcatccttaacaaacggataagcttcttctaacttaggcatcttagcaggatcattaaccgcaaatgctaccaattcacttaaacggtgatccatatatgctttggcacgtaaatcatttaattctcgcttcctgttagcggcaatttgcgtcatgatttccgcaaagtctaaatcccagaaatgatcagcgtctattcctgattcaacagcgattgggtaaagatctttgaataaatctgatactgtatcgtaatttttttcgtttacagcaactgatcttgggtcgcttccactggatctaatgtcacttcgcccgattccgaattggtcttcgatgacttcttctttttgccgaaaaaaccagacgcttcaaatagttccattaaggcattaaagagatccatcgtggtattaccatcatctaagtacttttcaaaggcgttcaatactcgtttatcagttacgccatgattttgattagcgccttgtaatacgatcaggatttcattaactggaggtagcttatttccaccttgagagtccataaataaggacaacatagacttgccaagtcgccgttcaatcttaaatacctcacgaccgccaagctttaagtcaagttccaaatcacctaattgcattgtctttgttgctttcttaacagtagttgtcatatgaataaattctcctttaatttttatttgtcactaaagataaacgtgggaatcgaacccacgtttattaataaactagccttttggtgtatcactacctggtgcagcagtgaagtgtggaccatcagatacagtaatagtaattgtgtaacctaatgccccgttaactgcaaccgctgcaaacttgatgttgtatgaaccacgcattgtagcagtcattccatctgggtaagtaactttccattggtattgtttccgatcaccggcttgttttagggctttagcaaaactagcacctttatatacagcttggaactgaacgttagaagcattttgaatcccttcaacttgcttccgccggtcatcagccaaagtagtgacatcaaccttttcagtgtcaccacctaattcgggaatagtcttgatatctgcaatttcttcccacgttgatccatcttctgaacgttcaagcttggtaccagtaccaaccagaccttctgaactatcgatagcaaaacgttgtaggtctaactttaatgcgtcactatataattttacattcttcataatttcatcctttctggtatacacgtttacttgtgttatctacaattcctgtaaagacaagtacaacacgtgttattccattcaaatcttgatcaccaatgttattagaaaagcccattgccgaaaacttagcaatgagcttattttttatttgcgttaaagaacctttatcattgtacaaatcaattgttatcttccattctgtatcagtctcttcttggtaggcattacgtatataagaagactgagttgttgaatagatagcaattggaaatgccgtgaatttatcaggataagacggcgagacaatctttaattctggaatagacttcaacgtcttatataccagtgctttaacattgtagatttccatttaaccacctaatttatcacgaagctcttggtcaactgatttctttataatcccaggtgcttccttagctattctgttagcagaaggtgtcataaattgtcttgctggttggccgttggttcgataaaaatacttgtccttaatcttaacctttggaattccatagatttttgtaaggtcaatatcaacttcctcagctggaatgtaccagggagtttggcgataaacaattgccacattaggtggaagctgcttactagattgttcaccaaccttaccagtaccaaactcacggaaaatagcgatcattgacgaattccaccaacgaccaactatttcatccccatcgacttttacttcatgcttaaagctacgggcaagttcaccagtagaatatttgatactagattgcaactcttggactgcataggcttcggcttgttcaattgctgtctcttggccgttaacagttgcatctgctacaacttgaggaagttttcgtagcttagtttttaactcattgagccccacaatctcacattcaatcattttgctcatccctcttgatacgttctaaagtaacgtttttatgagtagaaaactcttgaatagccgtaatcttataatcaggatcactagaactcggaacttttaggcaaataccaaagccttcgccgtgcccttctgaaagtaaattgccttgatacttacatgtcttaatatatttaatatcttttccataaatttgcgcattgaccgtaccaccagctgattgaacattcatcctgattggttgtggatcaccccagccagaaatgctatagccttcatcatcttgagtattcattggttctttaagataaacggttgtaagatcactttcttttaatctcatagcttcgtcaccttagcaattcgatagcggtttaatccttgtcgaatatcttttggaataccagtctcgagataattagttactccaccttccgagcgttgtgtttcgccttcaagtcccagtcggttgtagttaatgactgccaactttttaacatacacactcatgttaccaactaattctttttgacccgtataatctagcacctgagcatttgcttcttctactagctccttaattaattcatcatccgtaacttttaaacgagcacttacggatggaaccatttcggccacttgatccacattcagcacctccaattaattaaaggactttagcttggtatacattatcagcactagcaaatgatggaagcatggttgccgctgctaatacccaagttccaattggatcttcaccagattcataaatcttagccataacattaccaacttctgatacttgcgcattagttgagatcaaacggttttcttctggagttgggccatagatcttttcacctggcacttcatcattaaagagaacgatccgatcttccgggaagtatgtttgtgttttaactttacccttagcgtcttcctcacgatacttaccagcatatgcacgaataaccggaagtccttgagcaaccatgaattgatctaaatcagcttgaccaacaacccgaccggtatctttaccaaagattgcttccttgatttcagtactacgcattaatgtccgtaataccttcttagaggtcaatgcacgtgttggggtaatgtcgagcttatcagaccaatcttgtaagttttcaatgattgaagcactaccgctatcccaagtagtattacttgctaatgcagtttgatgctcttttggaacttgataatcaatggaaatcccgttgtccttatcagtaatcttaccagtagcaaacatttccattgtcatcttttcgccacgtgctttcaccgcttgaaccattgcatcaatatcattaaatacatattgctttaagtagttagcttcggcattattacgtggataacgtaacttgattaacatttcttcggtaatttgcatcttgcgctttacatatgctaattcagcagtcatcttacttgcttcacgactaccgatttcggcttcggcatcaaaggctgaatagctagcaattgttggaacacgactaccagcttttaagatatcgacttcgagtgttggaaccttagttgctggaaataaagtatcacctaacatatctggatattgacgattacgagtataatcaagcaccgtattctgatcgaacatatcaagaattggtgtggcaaaacgttgtaaatctagcttaagtgtttgcttattcatctattatctcctcctcactacgcttttggatctgctgtggtagtatctaaatccttaaagtgaattgctgtcattgctttaattgcatctgctgatggagttggagttaatcgttgacttaatacccaaccttcacgcataacagctaccatttgattagaaccatcttctgatacatatacatcattaacagtaataccaaccgcctttgcatcattcgttggatatactgtcccagcaggtacatacttgcgtcctaagtcatcagtttggacattgtaattgtccttgttaattgtttcagggaaagcagtgaacttctcagaagcaaggaagtttaattgcttaccgttttgaaatcgtgtgtacattaattttcattctcctttcttatttccaaaaatcactttcagatttattagcactattagccttttcggcataaagctcaccggccgatttatgagtcaaatcatcatccgtactcttaggtgttcgtgagccttgtgctaatcgagtttcaacggcatcatgaacggcgctacgaaatacttcgcttacccgttcatacgtttcattcatattgtcttcgttagctagaacatcatcaaaaacatcaactaacccagttggcaaaccatcatcaactaaacgagaagcaagcttacttcgattctcacgcttagtaacatcagcttcacgagcagataaagcttcttcccgttgcttgaagtcatcctcacgtcgttcttcttcggtcatgttcttgcgatccttagctttctttgccttatcgctttgttccttttcccagttagccttagcagtccctaatgccttgtctaacttcttatcaaaataagaatccaattctgactgggtctggaacgtcatgaaaggcttattttgcgtatcagaatcatcattagtatccgttgcttcgtttcctgtatcagcacctccttctccatcttgtccttcatctgcaaaccgctgtaagttcagctttagcaaattgctataaaactttactttttccatagatataatcctttctacccatgcacactcgaatttatgactgcacgaaaaaagccactccatatttctacacagtgacttctaaaagtgtgtcttcaagcccacacacgtattcaattattgaagtagtttcatgacgtgcttaggtcaagatttattgttacctagatagattacaggcacagttcgacaaaacggatgcaaaggtggcacattcttaccaataactgcatcagatacgttaaaaactttattattaattgctcgacatatcttactggttcgactatcaagaacagcaattaactgatattgcttaactccccgtttcttccagctatcaagctttaccttagagtaaaaataattagcttcggttctgattaatcgactagcattgaaacgacttgtattaaactcatcttcaatttgcttaatcatttctcgttcagacattccacttaactctttagctgtaaacaattcttgcaagcgttcagcaagcttatcagtgttatcccaaatacgtgatgaaaagtttttaccttcccatctggaatttaatgctgcctccacataacgattaggtagctcagtgattttcgacttcggtacgtcttgttccatcgataccgttgcaatctgcttgtcagtcttagggttcttgataacgattttattttctttagattctaaggctggttttgttttattagagagcttgtaatcttttgctttatcatatacggctccttgcttttcgacttcggaccaggttcttttcattacatcagtatgcaatttaatattctgatccaattcaacgtctccaacatttttagcaactatatacgctttgacttgtaactcttccagtcgggtaattctgctcttagcggctaattgatttaagtaattatcaacagccttcttactttctttatcgacaatattgcttgctaacgcttgtaaggttacaagctcagatggtgagatgtgcgaagacatgatcgttgcaacttcattagcagtaatatcagcataaaaatagcgacgataaatcttttggacctcgtcgcttaaatatgcttgcgctttctggtatgccgtattaataacttttaggcgtttggttgcttcatcctggttctcttgttcatcttgcaagtctcgcaattgccaatagttgaaattgtttttatcaactttcataggctttcacctacaaaacagtgatgtattgaccatattgcttcacaagctgattaactgtattctcaaacgcgtttagcaaagttttatcttcaatgcgttcactatttgtaaatacagccgtcagagttccattctcatcatttacagccacgttagtacaattattaaccgtatgagttagcaaggtagaaaacgaagcacagacgatatcagagccttttacactatactcagcgtgtccgcttgctatgattgtcgtcttgttctgttccttttggatcttcactcgaatcatcttgactatcctccaattctaaacggtctggatcttgtcgctgtaacgcttgctggttctttttgatgttatcagcatcttgttgagccatttcatcaataacttcttgaacatccccaacttgtggaagccaactataagtaatcttgcgcggaagaataccgtcagcattcttaatgttgttaactacatcagacaggttaaccggaatgtttggtgttaacgatatatcacaaccatcaacatccgaattgccacctttaatattaacgatggtttggatcagttttaatcgccggtgcaagccatcgaagaagtaacgcttcttaattgaaataagattttcaagcccaaacagcttaaatttcattgcttcacctgacacatttcccataaacttttcatcgttcatatttggaacgtatgagatcttatgaatatcattttcgatcgattggctgagtagattaacctgtgtttcgtcgaaagttttagttagccattcaacatcagctccatcgtcacgagaaggcgcattaataacaccattctttaatgcttcaatagcatccgtatcctcttctaacacgaagccaaacgtaacaaggattgcatcgacaaaggcttctttatcagaaattcgatcagtttgcaggagattataagcatcaatcaacgagattagttgttcaaagtcaccctgtcgctcttcattatttcgatactcaattaatggaactgcattgaataagttatcgtattcgtcaacgatttgatcatctatcgatacttccattcctacttcagtgcgatattctacaatcttttttggcatgtataccgtgacactataaccatcagtctgtccacttaaattcttctttgcttgaacaaacacgccaaataaaggttcatgttcaaccgtatcatcagtaacaacaattgcggcacgtggatcaacggcttctactcgtaattcagtgttaggagtaatcttttcattgccaagctcatcaatgctaatagttggagcaattgttttaagataaagcaactcatagccatacccaaacacagataagtctttttcaagctcaatatcgtgcttatgaatatcaatcttttctagtgcttctaacacatcatcaatattcttacctttcttggcggtatatttaaccggattcccagtcataaaaccaacattcatatcagtgatgtacttagcatgattaatcataacgttagaagctttaactttagcattctcaaagcgatggttattaacttcttgatttccgttgtaataatcagcaagtttatctagcctgctttgtcgttctttcagtttacggatagcataattaatcgcttcaagatttggcttattaacatcctcaagtaattctctatcaattgcaacagccacataaacaccttctttctataaaccacgaacacgtggacgtttggtaatctttgcagtgaatcctttatggataaccatgtaaacgaaataacgcatagcatcgcaagcgtgatcatgttctttcactggtttatcttcaccacgttcggctgctttttcatcccatacatagctggataattctttaaataaattaggacattgattgctaaatagtatcttgccttcattcattgccgtttgggtaacacgaataccatctaccacatcattttttgccttttgcactcggaaaccattattccgtaacacagcaataaaagaagccgcagacgggtcaatgataatctttgcgtgaatgttcccaagaaacttcttaagctcctgacaatactgctcatctgtcttttggtgagcagtcgcacgtcctgaataataatattctttaactaagtaccaaacaccatgattgcgtccccacaacagaaatactgttgggttctgcgtaccgtaatcacaagacacataatacttttcaaaatgattaggcaattcattaactaccatcgtatctcgatcgaagttgtcatagatgaccccttctgacattacccacaagcctaaaatatagcgttgataaaacacgccagaatacattcggttataacgatcaatggtttcttgtgccaatgatggattgtcctgcatcataaaatgaagtcgtaacgctcgcttatctttcatttggtcaatccattcaagtttgaaccagtggtaaggtccttcggggttacagttaaaccacatcttagaacccgttaccgaacaacgagccgttgcctgattaacaaaactttgcggcataagtgcaacttcatcaaaaaagaaccccgccaaagtaataccttgaactaggtcctgtgatgcttcatctttaccgccaaaaatgaagtaataatttgtatgaccattcttgctgatcgttagcatattatccgaacgtgaatcgtgaatggcatacccttcactttctagcatgcttcttaatggtcttagcacgttacgcctaaatgaaccaattgttttaccagccattccaaactgctgaccattgaattgggtcatggaccatagcacgtatgataatgacatgacaactgtcttaccagcacgaacagaaccatcacagataatagcttcataaccctttaattcatcattagcccaccagctaagcgcttgaagttgtttccgactaaacggggtaaacttgaatctaactgtctttatccccatctttatcactccatatcttcttcataccattgctaagggcagcaagtaatgagttggtgctttcatcattaacttctggttctggcaagcgatcaagtaagatctgcattgccttctgacgatcttccatttcaacaactggctcacctttatcaattcgaatactcttgatgttcgatgtatcaatcttgctactatcttttaactcaacaatattcgtatagtaataagcctgttcgcctgtttcaggatcaatcttcggcacatagcggaaattacctccgccgtcttcataaggtccatttttatcgcgtaccttataataagccaaatgcttttctgttctgaacgatagaacgtcagtaacattgctagtcgcttgatttaagtaacgtagcaagatgtcattggcggtcgcatatagttcttgcgattgctgtttctttaactcagtaaggtaagattttatccgagcatttccgagcaatctaggaccgttagtcgttgctacattgtaacttccaccataagctttttgataagcccaagtagcgttgtatcgttgcaagtaatacagacaaaaggctttttgcttatcattaagttcatcactatctggcaattctggaggcggtaacgacggtgcaaccttttcttgttttgtacgcgtactttttacttttgtatgcatacttttcttcttggttgcattgtttcgttgccatttattcctggtcttccatgacttaactgtactaagtgcaacgccatacttcttggcaatgtccttatatttcatcccagctaagtaatccgccttagcttcttccatcttactcatggcatatcaccacaccacctttctaaatttgtgtacaaaaaaagcacctgcaaattgcagatgctaataatgagggcgcccggagttgcaccaggatcttgccacattggcacgttttcctttataaactacttccctcgtctataaaactttatttaagtaatctcgtagctttattgcattttctttagataatttgaataccgtctgttgatcatcttgttcccgtgttccttgacgcatattagggtaataaagattagttaataaaacatcaatactatctggttgctttaagaagctgatctcagcctccattcccagatgatcgtcaatcttatctttatacattgcattaaaccaaccatcatcaatgatcaacgaatgatcttttacattcttaaatgattttctatgcattctttacctctcataattgattcagctactcttatcacctaactcacagagaagctagttgatagatatataccacatggcgccatcgcgctaatcgttattctgtttccgtggatccttagtaccagtgattgcttccattccctcggtagtaactatccattgctttccaaactttcttatagaaccatttggaaatttatctgggttctgctgataagttctccttacatagttttcagcatggccccagattatggacgcttctttagcatccataatatctggagtgttcaagtttatcctagccatacgcgtacagccccatagacaacccatgccactacaccagtaatcaaagcaagtttaatacttttacgatactttttttcttgtttactcatgataaaatagaatatagcaaagcgggcgaggctctcacctcaaccctttgttatcgtttatttaaggaaatgcttaacgactattttaattgtttctgcaatcggataagcaggcactgcccatgcagctattgccgcccactttgtagcttcaactttgtcgttctgcttttcctttttctttttatgttttgccatattcctatcctcctttcacttattataatagtactatatcgtacgtaagtcaagtgaattagagggaaaactcatttatttttatgtactttaaaagccggcaagcgttgacctgtcggctttttctttgctaatcgtttcctagtgcgttcagcatgagctaacatatgcaattcagcaccgctgttggtaaagccccaattcttagttgttctcatatgttaattcctttaaccattcaatagcgtcttgggatagtttcagatgatgaccgtattcaccatcatctgaaaacgtaacgagtttgccagtcatcatatgttttaaatcgccagcattcagttcagtgggttctccaccaccccaaagattatattcttctggcacatcttcccagcgcttgcaatttagcctagttacctctgtcacttccaactcctcctatcaatctatcaaaacaaaaaagcacccattgctgagtgcttgtatcaaggctatggaagaaacacgagtaagtaggtgcttcctcctttcgttgattgttgttaaaagtagatgagccttgaatgctgatggacggaatcgaaccgccttctccacgttgaaacggaaacaactgtggtgctttaccattaagctacgtcagcataatacagaaatgcttgcatccactaatcgtttttgaattttgttactcattgcatctctgcattaaatcacggcttagacaaaaaagactatgcaattacgaaagaggagcgttcatctcctatcatagttaaatttgccgtgataaagccgagaggtggattcaaaccacacttttgccacacgatcaagtgtgcccatcttggttctcagcaagcagtgcgacccgttaacactgcaattacgaatatcgggaactgcccccgcaagtattgggccactccaggatacttggcatctagtttgcatattcgcataatcaggaccacgtaatcaccgcacccggtcgtagttttccgcctactcctgtaacggtattgctgtccattcatacggtaatcctttagccgctgagttagattacatactcttctgctgattacagcacggttgctacgagactatcagagtagcatgtaaatttaatgataaaggagatcttccaatcttccaaaacgcacaaaccaaatttaatcgttaccgtaaatttcttttgaagttaatgatagtctcaatgtggattatggtcatctgccaccatcgcgtcggcttgtttaccggattccacacttcctacgcttaacaagagagatcccgttgcgagtatcgttaaacgttggaaacacgcatagcagtttcaggattgcttaggcacatatttaaacggagcgtgcaaagttttattagctaactttgcgacgataacataatataacgttatatctcccgttgtattcccgtttttgtcctcttttcatcccatttttgtcccgttttcttcctgttttttgctcgcaagtcaggaataatatcagaatcaacattaagccgttcacataccgcttctaaacaatccgcaaattctaagcaagcataatcatcagctcgatagtaagtagaattgccgaatttgttaattcgctctttaattactgaaagagataaaccttgaatatatctatacttgataatttgttggctagggtgtcggtaactactgctgcatcctgcaatcgcatagtcaaccgctcgttttgccaacgtgtattcagcatattcgatcatgcttttttctgaaccattgccacgtcttgatcctcgaatacctgtaatatcattctgtggcgatttaataccccaatcacccgatctacgtctaatagttgggtacttatcttcgtctaaaaagaaattctgtacgttcgcaattgttgctttcttattatccccttttaatagttccactatttgcacgctccccttgtgatataatagttatgctttaaatttatatctatggaggcgttctcatagtgagggcgtcttttttttacgctttttaacgcaatttaacgctttttaatgctatccaaagaaagaaaagacagcataccaaatactgaataccatgtatagcactccgcctagacctaacaatgcaatgccagcaactataagcccgataaatccaattactgtatatcccgcaaaattacgtattactcttcccatcttttccctccaaattcacttctattctttaatcttgttatttgcgtctttcaaaatgtcagatattttttcttgccttaaaactgcttctacatctgtaattctcaattgtccgtaatagcctgtattacgaaataacactcctacgtgacgataatattcaggttttgataaccctgtaatctttagaatagtagactgtttagtgccaatttttcgcaagatataagcttgtgcaaaagggttattaatattgtgcttataaaaatattgcttaattcgccattcggcttctttaattcttctaggttctcgcaacttcaaacccttacgaaacttcataatttcttgaagtcgccaatcatcaggagcaaggatctcttctggcatttcattaactccaccccattcatgattaacagttaatgaatccattgctttagatagtcttttaggtattgccatcttcatttacctcctctacctcgatttctaccctaggatggtcactgtaatacttttcagcaactatctttacaatctggttgtcatcttcccatagcaggccgtttaagccatccaaagtagatttgatgtaattatccgtgtccggttttacaatcggtctgtgtattcctgcgatccgcaattcgcgttcttttttcgatatgcttgattgaatgtgtcggtaaaatttaagactaacaattagcgggcctgttaaaggctcttttttgtattgaaattggcacatcatcgccaattgttttttgtataccgacactttctttggatcatacaagcgtattcccttacccattcgagttgctctaggccgtgcttgttctacaggttcaatttcaaaggtaagtttcactaatctaccctctcgtaagttcgttcaaatatatcttgatcgatagcccaatgctctccatctatgccagtagcgacgtaatcacctttgtgaactcgcatcggtccttctttagtatctaagtaaccagtcccaccgtcttcaggaaaccaaggctctccgcaatcaagcctcataggatcccagctcagtgctagttggtaatgttctgcttcggcacgagttaatacctgttcagcctcaattaaggctgtctttctgtatttgtgtagcattattcttcctccatcctgtgagtttcccagtcataactaaccattgtttcaactttgaattttttatcacatccaatgcaagagatttcatgctcaccatcttcatacaattcgggatattcaattaaatcatcatcactaattgcagcaccacaataaggacaaactacataatcactgctaaaagtatccggttccccttcttcaatgctttctctaattttcgctaagttgcgaagttttaagcaatcattgcaatatccgccatttacccaggctaatttgtcatactttccacacatcttgcagtgatgatcttgataatctagcgtcattattcttcctcctcatgttcactctcacgattaaatttagccaattctaattctgtaatgaatggtttcccgttatattgggcttccacagaacgcttaaaaaattcaacagctttgtgttctggatataagaatttaagcttatccatgattgccatcgctctaagtttttgctctaagctccccgctttgttaaacgacttcgacagtagatcagcaaaccgtagtaaatcatggagttgtttattgctaatccagtaaggttgatccgcttgtttacggccgaattgctcagtaagaattgtttctagctttttcagataagcatcattttctaagctttcataaagatattcacctaatgctttcttttcttcgttcatcatttcttccacctcttaggctttctagctttgctgtgccaccattgtgaccattcgtagctggtgtgatcgtgccaagccatcatgtgcttggccttagcaatctgtcgcttacgagtgcgtttgattggtttaattctcttgcacttatggaaagctgcatgaagatctttacggagtttgggtgtcattatcataactgctttaatcttcattagatactcaccatcccttcaaataatacataagcctgtcacgttcataatcagttgctattattcttccgttttcaatctgtgaaatttctacagtactaattcctgatacaactgataaatgtttagcagtccatccttttttcaggcgagttgatctcaacaagtcaccaacatttgtatggactctaggtttttttctcctaattgtattgtcgcaaacccgacaatgcatatttttctcaaaacgcgccaatctccctatccaaaactcatgaccacaatccaaacttttaatcttaagtggtttatttgcattttgatatgcggaaacaattatgaagtttggggaaagcttatttttagcgattttaaatccacgttctcgaagggagtttatattccgtttacgagcacaataggggcaaccatctcctctataaatgctgtaaggtcgttgcatatatatattgccgcaagcaagatgtttaacctgtgtttttaccgaagaccctttatactcaccaacctcgtattcaggaccaagtatttttaatgcacgtctttcaaattcttcttgagttatatgttttcctctgtaaagatcgctatattgcaaaaccatcaacccattcggaaatgttataaatttcttgtagttcagcagtgtggggcattttgataacttcactaaatgctaaaaagtcacttgtatcattacgaataaaataaacatcctttgccttcctgcttaaagaatcacactggattgctactccattcatccccctaattgccatattgaataacaagaaaggaattgctctatctgacatttcttctacttgataccaataagctctagggtcataagtaaagattgacaagaattttaagttaggatcagcgtgtaatggattaccaacccgatcatttatacagtcatcccaccagcgcttgattaaaattccacctgtccctgcagctacctcgaaatagtggccgttagatttatcgctatcaactaagctattaagcaaggtcgcaatgctatcaggggtaaaatcctgcttcttgcttttccgttcagcttgctcatcttcaaaatattcatggaaccagtcaaactttaggtccgttgaaacttctaggaacttcttaaagacttctggacgtttttgatcattaagcattagctgcagcattctttccggagctttatatgactcatcaactcctaacagtttattaactgtcttagtatcaaattgcattatttcacctcaaattccggccatcacagtcataatcttgttgtcatcctcttgggctagttcatcaagaagatggatatatactcgttgcgttgtttcagtatcaccatgtccaaggcgcttagctactgattgaatagacacacgattagcaattaatatcgatgcatgagtatgacgcaagccatgaactgtaacccgatgaacccctgcttcccaacacattctttctaacttagtattaaacgtactattaaaaattcgaggttcaccgtaaacaggagatggcttgctaatcgacgcataccaagtcggccatattggttcatccggttctagcccttccatatgtttttgtagatccatcaaagtcttgtaatcaattttgatcatcctaaccgaatacttatttttcgttggcataaattttccatactcatcactgccatattttttggacttgtagttgaaagtcttattgatataaatagtcatattatccatatcaacatctttaggtgtaatgccaagtgcttctgcaaaacgggtaccagttcgtaagctaaagtcaaagaagtcaccccaaccaatctgatcctttttgaagaccttttctagtttccttacttcgtccatttctaagtatttaggacctttattatcgggttgaaccatcgaagttattttaattttatgatttggatttttacccgtgatccatccttcgtaaacggcatcgtcaatcgccgcagcaatatggtggtaaaagtcaagaaccgttgctttttgatgagtctgaccataaacattaattaacatctgtagatcttcacgcgtcatatcacccaaaattaggtctggtgctaactttttcaaccacttcaaaactagcttatatttagctgtcgttactcctctaactgaattaactttgtaggtcatataccattgctcgtaatatttccaaaatttaattaagcgtttcttaccagtctttgccatagtttccctccgccttataaaaatcgaggatagcttgattaatttcaggcaccttcattgcatcaatcgatggtgcaagagatggttcacgttttttaatttgatttaattctttctcactaaaaattcttgcttctttttcatcttcagataaatcaaaaacaagttcatcaaatccagtgatgatatttgatacatactttggatgaaaagatgtctctcgtttagctactaatcgatacttcttttctggaaaacgttcattaactggtgtatcaagcagccgctggataacgtccatggcacgtgctaggtcttctggtgcaacttcagttaagccaccccaatgttttaaaaccgtatcccagttaatcgccttagtattcaattttaagaaccaattatcgcttatcatgtcttttgaaaaaacgttcaaatagtcgccatccacttttgctctaactgtcatagttgaattaataacgtttactgcttcatcaattttcattgtgctacctcctcaatttccttgctctcacgatctttaacaggcgttgcgatgtactgatcaatcaaatcagcaatcttatcccgcagctcatcgtttagatcaaaaatcacctttgacgcttcttcggtagtaatatcccaaaactcaggatcaagccattcttcgggccagccctcaaagttatcgccaaacggttgagcgatactctttgcctttggatcaattgtcataaaccaccggcaatctttgtcatcgtctcggtattcttcccgatccgcgtaaatgtcgataccataaatatcgctacggatagcgaacactttaggcaactgattaatccgctcaattaggtcatcggttgttaaatactcttctgcattcatgctgtctttgcctcctcgtaattccaattggtgcaggctttgtcacgtagcaaacggcactcgtgacaccaattagctgcatctttaacgttttgctttgtaatcggtgcttttaaggcctgtttcatttgatttcctgtaagcggcatggtgtagttgctatcatgttcgtctaactgtgacagataataaatcgctatctgtagcttggttttaacgaatttgattgcccgtgcctcaacattatggctatcccattcatcttgggttatctgcaccatacgcttagcaacagcccacttagcccgtacttcatccttagtcatgtgttactgcacctcgctctcatctggtagttgatccatccaattaccttgatcagacttgccctgtttctcctgctcttgttcacgtttaaaccactcaggcataggttcgttaattggcgcacgtttgccatacctttgtctttgattattagccgtgctagggttggcatttaagtacccatcaatctttgatgagcgaaagagcgtttctggtttcaagtaattgtcacctaattcgccgtttctaaacgttaccccgtgccacaatgagtacatgttatcgattacctttttcatctcatcgactgtgtagtcttctttgagtcgaggttcaataattcgcttattaccatcagcatcaggcttgaagtgcttgccagttttttgattgagatattcaacaacttctcgccgctgtgcagcaatggaaggttgggctggctgtgcctgccctttatctcttgtagtagtcttttgtgtagtctcttggtagtctattggtattggttgggtagattcttcctctccgattgggcagtttttaccgtctccattgggtagattcttcccattcgttgggtagtttctacccaatcgttgttccaaatgggaaaatgcgtcatagtcaattcgataccactttgttttgtcaaaagataatttattatagttgcctgtaataattagtcctcgtttttctaatttcttaaagtggttcgatagagcctttctagaaagccaagggaactgtttattccaatcagccatgctgttatagacccatttgtgattgtctcttactgtattagaacgttgaagccaatagtgaagctgctggagaataacagcttcgtctaagcttttcaacgctccagctaacgatgcctgaacttgtaacggtctttcatcaagtaatagtttgctcatagttaccgttaactcctatcttttttaagtcttttttgcttaatttaattcctacggttgtaaggtgatacttcttacagaactctgtaatacctatcttgtggaattctgtatggtgaactctgcataacgccattgcacggtgtttagtgtgatctgtcttattgcggttgttacccataccaacggtatctatatggtgaaaatctgcatgctgtccacaaatcaaacactgtttatgcattaagcattcatactgaaaatgttcttcatttcttggcaagagttcatatcctttcttaactggtacttgattgtcaaaaataaaatcaattacataatcaattaatcgtttagcgtcactcatgctattagatgagccatcttttaagctgatttcttcaccgtcattcttgatccagtaaagattgtggaaatattcatcaattatttctttgctctctccagaccagttaataatgtcacctagcaacgcatagtaaaaatggcgttgtaactcgcttatttcacgtttatcaacaaaagtgaccattgcaggtacgccttgaactttaccgtcattgatattggctacatgttcccagttgacttcttccaagtattcggaaattccgaaacgcttaccgttcttttcttgaacataaacctttgctggaatcttcattgatggcatttatatcagtccttagaagggcaattggtcattatcaatatcaattggagcgccgttaccgtcattaaatggctgtttattatttgcttggctagcagtgccaaagccgttgttagtttgattactgttattttgagggcgtttttgtccgtttggctggcttccgtccgcttgtaacatacggtaacgtgttactactaaataggtattaccgttgtaatcactcttttgccattcagtttcaacggctaacttttgattagccattttttgcacaaaatcaggaattgagtaaataggttcgttatcttggtatccagctgcaattaatggagtattaaatcgcttaactgataaatcatgattttcttgtgtattattagtccaaacaagtcgatcaaagatatgtttgcccttttgtgttccatctaaaacaatgtaatccattgaagccattgggttaccattctttgagttgccggcttttgattgtgcagaaacataaatgttatagattcccgcttcatcaggtacctgtgagccgaatgtgttgttgtggttagtgacaaataatggttgttggttattcataattaagcagctccttcttcttttgcttgttcttcttgtttagattcaattaattcttctgcatgaaatttcttacgatcatcaattctgttctttccgtgattaccgctttctgggtcgcaatcaatccaacgttggttgtcttggacgtatagccgtccgacaaaatcaaacacgctagtaaacgcgttaaacgtcttttcattcatatcagccccgtaacgtcctgctcctgttaatccaccagtaccgttatcaatttggtgtgcagtagcgtagatagttacattgctctctcgtagcatagtggctaattgtctgaaccaaatttgtaacttctgataattttgtcgattatcttttgaagcattgtcgatgttttctaacaccaagttttgtaatgaagtgacgttgtctaatgcgattgcttgatattcgccactcttaatggctcgttgtaagaagcccaccgttaactgctgaatgttagcgaagtcgtcttcttcaacgaccataaagtcagtatctttttgattacgcagtggattggttgacttatcaaaactgaaaagaagtttttttcctttgaattgtttgaataagcttgtcttgcctgttccgccatcgccatagataaaatacatattaggaacttctggaattgctccggctttatagaacttcataacttaccacctaccgatccaatcgaatgacacattgcttcttgccaccctttacaccagataatccctcaataatttctcccgtttcattaagtatgacttttccatcatctgtaatcgtggtagctcccttgatctttgctttgtcaagttcagtgactgttttgagtaaatcactaggtaactgcttcattgccttcctttgtgcaacagcacctccccacttccaactatcactggtcgttcttgcttgaacgttacccattgatgtagatacagacgtttgaccatgctcggtgtcaataaatccaagcaattctgtcatcaagattgcattatcgtcttccgccctttttattttgctttcgtaaaagtttttaacttcatcaatttctgccttttcagaagcctttgcttcttcaattaatttcttgtttttcttgtactgccgtaaacgctgattaattgcaacagctttatcagcttcaaattccacttgattattcatggattagcttcttcctttctgctaaatggtatgcttcggtttcaacttcttttgcgtcttgcttaaaatcgctctgattatctagatcgtctaacagatacatcattgctcgtgctatgtcataatcataagcaccatcgcttaaaatcagattcacgttatagaggttacgtgctaaaactttttgcattcttttaagtcgttgtttataaaattcgttcatatgctataatctccttagatataatttttcatatgctatctatttgccatcggtgttcccagcaccggtggctttttttgtgttcaaatcccatagcattagcagatagaagaacagtaagaacactgctccgccatagtcaccaacgcctgcgcaataggtgatccaagcacccattagcattgctaagagctttgaattaactatttttgttagtgtcatttgattacctcctctcgttgttgcttaatgaactcaaatattttccttgctgtcggcacctgatcagctgtaatctggcgaacatctttaaggccgagcacgtatttaattggacggtaaatagcatcttgaattgtcatatagccaatgccgtctttcttaactcgtaccttaatgaattcttggatttccttactaagtttccgccaatccgggctaatcttaggttcattatccttcttgcttaattcataaaccttcaatgcaattgcgttcatttcttcttctgtcattgccattagttcttgttctcctctgctgttaacttctgatatttacgatcaaattctcgactatatttaatacaagcgttagtcacaacagtattaacacttgatccgttgtattccgctattttgttaagcttattggctacccattcgggaagtcgtactgatcgtctaactctctccatgttatccctcccgacatattttatgtgtctataatagggtgacacttttaatgtgtcaatacttttttaagcctaattggtataattttggtgtcaggaggtggtaccgtgagttccacaacaattaccattcgtctccctttagagttatcagataagctcgattacgtatctgaaaatattggaatgactaaatcaaatttaataagagttgcaattttaaaatatctagatgtaaaacagcttgatgaatttgaagaaataaaagcatcgtcagaaagtaataagcgaatcaatttatcattaactgagttactttattcaatagttaagaagcgatctgataacttaggcgtaactgtaaacagccttatcatttatgcttcggaaaaaattcaaaaacattattcatacatgcttgaatcattagaccagtaacgctaataccggttaatttactgattcttaataagtcatcatcgacttgttttggcaaacgtactgttatatatttcatatttcctccatactctcctttgaagggaggtgagtttatgactgataaagaaattgctttggaattgaccaagatctacgttgaacacttaaataaacaaatggacaataagcatcaacatactgatcttgacttcaaagcctttgggaacgtatattcaaacctttatcaactagttcatttaattgataattctgatgaaggtaagtaattgatattaatatttacttcattagccgaaagagttgctacttcatctagcagctcttttatttcattcaagttagtgcaagtggttgaaatatctagtgttagttgttccatttttgtttacctcctctgaaaacatctaagctaacgtctaatgcgtcagcaatcttacacatgtttttgaacggtggttccttcccatcgtttttgtagttataaattgttgttagtggtatgcctgtcattttagataggcgataaactgttatcttctgtttgtctaactgaatttgtatgctattccacaacatcttgtataaatcaactctttctatatccatatgtagtgttataatcaaaattacgattatttacataacactccttttagtaaattaatcgtcaattcaatcaaagtgaggtgtaattaatgttctttagtcttcgcaaatcatctgatggacaatattatttcgttatcaaatcagataatcaggaagtagttgctactagcgagacctacattctcaaagaatcagctaaacataccatcaacgcaattaagaatggtattaattccgatactccagtatttgatattactgattgctaattattcgtttgatcttattggctagagttagattttttgcagcttgttcttcaagctggcaagtaatcttctctagctcttttttattttcttcatccataaatcgttacctcctaatgtttctttctgtacttttctttcagcacattcagtttctcaccctcaataacgttgacgattgctccgattaagaagcaagccataatcgccaacacacaccatgctagatacgccatttaatcacctctcaacgcttttacatatgggctttcatgatcttcgtagtatctttctgatcgaaatgtttcaaacttttgatattccttcaaatcaacgcgaccaccggcaagaaatacctttcgccagtctggatagttttcttgcgcccaaactttgcgtctatcaaaagtcgactttgacataggtacttctatttccttgtcgcctatctttttaattgacttccaaacattacagaattctagcctgttcatctggtataaatatgggctcatctaatcacctcctctcttttgctatacttagttcatcccctacgaaaggaggtaactactatcactactcattacagttatgaggaagctcttgaagacgttgcacgcattacgaattacatccctccagaagcacgtaaagcaatgcagctagcttcgcaagctaaccaacaaattacagaagcacttgcccctattcagggacagctttcccaacttcaagaactgctcgcttttacttcgaactttgatattaaaattgcctcgactctcaatagaatcaacaatgaaattattcactacccagttgaatcatttgttaaacttgcggataccgtcgatgatcttcccgaatctaacttcgatcattccaatcacgaaagcaggaagtttacccgaaatagttattccggttgcaatgatactgaagcagacagcacacgatataacgtcaagctttttataaaaaaacaaatcgatcagttcaaaaagaataattccatagaagagataaaagtcccagatgtcgattactgcttcaaatttttcaagcttctttttcatacaataaataccctctgtatcatttacggtgtctataacgacacttttacttatgtgctcatagaagcgatcataacgaatatcgacgacatccttgatttcagggataagtaatcgtctgtcactagatgtctaccgtcttctgcaaaagaccgtagacattctttttttgtcttgggtatctccttacatatccagcacacggtagatcttcttacgaatctcgatcgctttcggtgagttatcacccttaattgctcgattaacttgttgacgattaatgtttagcaaacgtgataactcagcttgtgtcatatcacgatcaagaagtttcattttgatgtttcgctccacgtcagctgttgctttttcaagctcattttctactggcatatcctattcctcctctcttgaaatgtttatcaacttgttgcttgtttctatcactcgtgataaaatcagcttaaaacaaaaaccgttattttacggcatttatggcttttgtttatgttacttaacttgttgacaatcttattatcaatcattcgtgataaattgtcaactgttttttaatcattcgtgataaaaatagtcaaaagaaggtttgattgatatgaaaactgtagacagaattaagaaattatcgaaaaagagaggatggtcactgcaaaaagtagcagaagaagccggtataggaatcaatagtatatatcgttggaactcaaaaactcccagtacacaatctttaaataaagttgctaaggtcctaggagtatctgcagactacttgcttggtgaaactgagaaaaagaaaacagccgatctcgcagataaagatactgtctttacgttcgaagggagggaaattccgcctgaggatttagaatatatgaagcgtttattgcgtggtgatgataaatgatatatcaacaagcagaagaagcatacgattatcttttagaaaaagctgcagaatatcatattgatgttaaatggaaacacttttctccttatactccacctgggagtagttacgaatatcgacgtgtagtaatgaaccttaattggcatcggccgaaagaaattatttttcagtttgcacatgaattagctcacgttattcatggcgatcatggagacgttgtatattatcacgcgtcttttactggtaaagagtcagttgaatataaggcaaatgttggtgctgttgaattactagtccctttttactgtcaagaagtagatagagaatgcgctaatagcgcaaactttatggaagtattcgatgttcccaattatttaacagacgtggttaataagcaaattcatgattactatgtagtttaatgccacgtccaaaaactgatcgacgttaaaagctgaattttatttatattaggaggaatatcacgttggcaaagaaaattagggatgcagaggggaatgtttataaagaagttattgccccagacaagaacaggaaaagaactctcgaaattgttgttggagtaattgcaatgattctttctgttctatttattggtggtagctttggagctgcggctgtagcggatgcttttggtggtgagggttattacaccgccagaatgatgctaggacttattcttgcaatcatttcttttgttttagtatttttcataaacaaaaatcaaaaagttattggttggtcaatcaccattatgggcgcaatcattctgtttatgtgcggtgactatggaattattccgggcattgtctacataattgatggcattttagcattagttagaaaataatttaggaagactcgttacatggctaaaaagattacagataaagatggaaaaacttatgtgcaagtaaaaccatggtacaagcgctggttgatttgggtaattgttgtaattgtcgctttatttttaatcggttcattaactggcaacagtgaaagtaaaagtagctctggatcaggaagtaatactcaaacaacatctccttctagaattactgttgattatgacgattataaagttcagtcttcaaaaacatataaactaaattacagcaatactgattgggataaagctgatgtaaaaatcaataaagttactgtatataaactttccaagccttatgaattcgattcagctagcgatggtaaatatgacattaacggttttattaaattagatatgactattaaagcaaatggtgatatttcaatttatccgcaacaaggtactgccgttattggaagtgaacaagaagatgctgttggtgaatcatgggatggtgatataaacgacggcgtagaaaaatctggagaagtttatattcctatcaaagaccttgatagcccttcaagcatttcagatattagatttaagtttagcgctaacgatcaagatatggatagcgatcatgattacgacttaacattgaatctagataacaattaatatatcttatcaccggcatttgccggatacataatgaccaaaatctgatgtcataaaaaatgaactataaaggagtaagatattatgagatctcgtttacgttacacttcaaaatggatgcaaatatatttggtggtttactttttcgcaatgattgctaacgtacttgttcaacattatttccgtcaatcattatttgctgatatttgtaattattttatcattcctgtttctagcacatttaccttttttgtattgtccttaatggtaaaagaaactgattctctaaataataaagcagataaaatgtccaagcacgactaagaaactagttataaaataaaaagccccctccgaagaaaggactacatcttaggatcagggctgttgagagcttgttcaaggagaaacttgaaatcatcatcatcatttgttaatgcttggtttctagcattctctagcgtaatattcctctgtccaagtattaatacagtttgtaagttcaacttctgccagtaagttaaagagctaagaaaggaatctattggtgaaatgttttgagatttaaaaagcatgactattttcctccaagtttaaaacatatttgtactttctggggaacaataataactataattatagcattatgggctatttcattcttctccaattggaataagttatttttatatttactgctagtagtagttgtattgttatcaattaatttaatttacaattttcatcttgagtatgaaaattttcaacagttaaatgacagttacattgagttaaaagatgaaaataaaaagttaaaagaacgtattgagaaccctaaaccgtcttcctcagattctagactaaattctttagaacatcaaatagctgaactaaataagaaagtttcatctatcgagcaaacaaatgatacctcatcgatgaaattaaaagacaacattacgagatctagtaaaaagaggacaaagtcaacaactatcagaagtaattataatttttctagtacttatatcgtcgataaggacggattagttcattttattaaaggagacaataagaatgacaactagcccaactataaacttcctagcagtaaatactaataaaaataaaaataaaatattaatgagtattactagtgattttctgcccatccaacaaataatccccttaaatgtaggtttgatatatttaaaacctaatacccaatataaaggtaatcttcaaatcaaatgtgatgataaaacaataattaatgatgatagtttactcttcccggaacaagaattgtcttcaagtaacgaaataattaatggccttgtaggagcaacatttaatataaatactcctgttataaatttagcggaaggcgcatacgctctaacactaacactaaaatcagccgatgataaagaacttagtaaaagatcaacatattttttcgctaaacatgagtaattaaatattttgtttagaaggatgtgaacatgaattgattgactccacaacaatcaatcaattcaaacattgatgtcattaaaagacgtgattattagggagtaatttatgaagaaaataggtcttatttgtactgctattattgcatgcatagttctttcaggctgcaataacttagcatcacaagaaatgcacaaaaaaagcgctgaatcatccagcgtgaaaaaacatcatactcatgacgaagatcaagatgatgacttttcattaaatcttgtaagttcagatgatcaagatactgattcgaatgatttagatattaatgttccatcagctaacacttcaactagttcagcatcaaatatccaagtaccccactttaattctaacggtactggttcccctacttctggtggtgatccaaaagttcaagctgaaaccgcaagcatacaacatgattggaacgttaagcaaggcatcgaaaaccctgatggaagcgaaacacaaaatttcaagaattgggtatctaagcgtgaccaagcagaagcaaatgggcaaagcatgccagaatatgatcaaaatcaacgatattaaacgggggaagattaatgaatactgaaagcaataagaaagaaccacaattttggaaaggtgatccttctggtggttttgcgaccggattagtcgccggattcatcatcgggctaatcaatatttgttcattcaatattccttggttgggaagaatctgtttcatagcaatttggctcgtcatgggtacacaaccccgatttaaggacacacgtacaccagaagaaattgctaaagataaagaagaacgagaacaaaagtttgaggaaataagagaacaagctaaagcaagagaagctgaacgtcaagcaaccaaagaacaaaaacgtgaagcaaaaatgcaaaagaatgagctgaaacttcaaaagaaccaacttaagattcagaaacatcaacttaaaaaccgcaataaaataaaatgccccaagtgtagaagtacaaacgtacaacctctcggagttcataagaaaggattttcagttggcaaggccgttggtggcaccattttggttggtggagttggatcacttgctggatttgctggcaaaagctcaaagaaaacagactttgtatgcatgaattgtggaaaacaatttaagaaataaaatcttgtccaaccaaattgatgacattaaaagctatttaatattcaagttttaaaccggtcgaaatcgaccggtttaaaaagcactataaaagaacatatgtacgggaaggactgtttattatgaataaaaatgaactgctggaatatatagatactaactccaccgccattactatcttcaaggataaggtacgtacagaacaagaagccaaaaataaaaagcgccaacctgctaaacgctggaatgacgctaaaatcgaacgcactgtagataaatttactgatgatttcatcagtaatgtttacgacaagttatataaaggggtgaaagccaatagaaatacaccaagaaataaatggattgagtttatcgaaactaacgaaatccttgatagtttagaagaatcagtaagtatgatggagattggagaagattaattatgtggatgcaagaacgcaatggaaaattccgcttctttgagcaatataaagatcctctaactaataagactaaaatcatcagtattacaatgaaagatcataaaaagagtactgctaagcaagctcaaattattctagataatcgcatatccaaagctttatcaaaagtcggtatcggaaaaataattcatggaattacactcaaacagttacttgatgaatatactgaatatgaaaagccacgaattaggagatcaacgtattatagccatcaaacaatggttaatactttactagatatttttggcaacgatgccttagttgaaaaatttaccccgcttatcattactgaaaaactagaaagtctaatgtatggggatagagagttgtccagtggctatgtatcacgatataagtactatctgcataagttatttgattatgcagtaaaacactcatatacaaaagataacccggttgataacgttaaaattgattataaggcccctgctaatggccaacaaattaaagacaagttcctcgaagctgatgaactgaaagccgtcctcaactatctatataacaatactcggatctacggagaactttgcgaatggttatatctcaccgggctacgttttggcgaagcagccgctttaagttttgatgatgtttaccaaaaggacaaccattggtttgtagatataaccggtacattagagtataaacgaattaaaatcaaagaacaaaaaaagagtgacgcacctaaaacatcatcctcagtccgtagtgttgtactaccaaagaaagccgttcaaatttatcttgatctgaagaaaaaatctaatggcaaaggttttatcttcgcaactgaaaatggcacaccgattcaaactgcctcagtaaatactgttttaagatcagcaaagaagaaacttaaacttaataaaccactaagtactcatgtatttagacatactcatatttcaaaaatggctgagttaggaattccgctatatgtaatccaacaacgagttggtcactccagtagtaagattacctcccagatatatcttcatgtgacacaaaaagcaattgaaaaggaagcgtcaaaacttgatgaactgtaaaaaacctaccaaaaacctaccatttactttaaaaaattatttttactctttcttttttcttaaaaaagaattttaaaacaaaaaagaacccttgatacacaagggttctgcactactagttgtcgcgacgacgttcagcgatacgagtagccttaccagtacgttcacgtaagtagtaaagcttagcacgacgtacacgaccgtaacgaagaacatcaatcttgtcaacacgtggtgagtgaactgggaaagtacgttcaacacctacaccgttactgatcttacgtacagtgtaagtagcactgataccagcaccgtggcgcttgataacaacaccttcgaacatctggatacgttcacgtgaaccttcaacaatccgagcgtgaacacgaatagtatcaccggcacggaattctggaatatcatcccgtaattgactagcagtaatcttttcgattaacttgttttgacgcataatatatttctttcctttcgccgacattcatgtcctgtatgacgggcagcggaataccgttattcacagctaaacagccaataactactatacattgttttcagctgtctttcaagggtaaattagtggttttctttattaatgattgaatgacgaattccatagataaagtaaattaacaaaccgatcacgaaccaaccaaccattaaaatttttgcatcagtatttaggccccagaagatcacggccgaaaagatcgccgaaattgctggaagtactggatataacggcatcttgaactgagcttcaggcaaatctaccccttcccgcggacgcaaggcataaattcccagagaaacaaagataaatgcgaccagggttcccgcagaaacaagggttgctaagaacgtaaatgggaaaacagaacccaagatcatagccaagaaagtaatcatccataatgcgtgattagggacgtgcttatcatcgatttggccgagtgattttggtagtaacccatcccgtccaaaagcataaattagtcgagaggaagctaaaaggattgcgattaacgcagagaaaataccaacaatcgctacaacggaaagcaagttcgccgtaatatagtgtccagactgtcttaaagcccaggctgctggttctgcattatttgcataacggctatatttaaacatccccactaatacgagcgaaaccgcaataaaaaagcctgttcctagtaatagtgtcccgatcaatcctcgtggcattgtcttttgcgggttaatcgtttcagctgtattagccgcaatcgcatcaaagccgacataggcaataaagatttgtgcagtcccagctaatattccctgccagccccaaaagtggtacctggttgatgagcagggagaaatgggacatagttttgcggatggattgcagttacgcccacaacaataaacattaaaattactaataactttacactaacaataatattttcaatccggctaacctgatggacaccgcgggaaattaaaactccaacaattagaattgcaaaggcggccagaatatcaatataagaccctgtatgtggatcaaaaccaccagttaaggcatgcggtaatttaatcccaaaactcccaagaaatccttgcatataggctgaccacccagacgcaacaaaagcgactgaaataaaatactcagctaaaagggcccagccagcaatccaaccaaagaattcaccaaacaaaacattgatccaggaaaaagcggaaccagcaaaaggcaggactgaggacgtttctgcataggctaatgccgataatcctgcgccaattgcagctacaatgaaggctaatggaactgcaggaccagtatgctcagctgccacaatccctggcaaagtaaagatagccgttcccactaccatcccagttcctaatccaattaagtctcttgttcgcaaactaggggttaattgtgcatccttttcttcataaacgcgggggttctgcttaagaaataatcgtttaattaattttttcattcgggtcaccttagtctggaacagttggatcttcatccagcttaatatcttctaacattaattgctgttcccgacttagcttagcagtttttaaaagatctggtcggcggtgaagagtccgtcgtagcgattcacgcatccgccattctttaattttctgatgattaccactcgtaagaacttccggtactttcatcccccgaaaatctgctggacgtgtatattgaggatattctagtaaaccgttactaaatgaatctcccattggtgaagacatgttgccgaggacaccaggaacaaagcggacagtcgcatcaatcatcaccatcgctgctaattccccgcctgttaacacatagtcgccaagagacgcttcatcggtaactaaattacggattcgttcatcatatccctcataatgaccgcagataaatgttaagtggtcttcctgggctaactctttggcataggcttgatcaaactttcgaccagcgggatccattaaaataacccgtccctttgaatactgatctttagtttgttcatgaattgcatccatagcgtcaaaaattggttgcgcttgaaggagcatccccgctcccccaccaaatggcgcatcgtcaacatggttatgcttatcggtagtatattgacgaaaatcggtcacattaatatcgataaatccattatcttgcgccttaccgataatggattcccccattgttgcttgaaacatattgggaataagcttaaaatatcaatcctcattattcaagtccttccattaattcgactgttacaagatttttatcaaggtcaacgtttttaacaacatcatcaatcactggtaataataactctcttttttctggacgttcaacaacccacacatcattcgcaccaggagataaaatttccttaattttccccagatgacgaccatctgttgtttcaacgtctaatccaataatctggtggtagtaatattgaccatcgtctaatggctgttgatcatcagcactgaccattaattcatgatcacggaattgttcaacaccattaatattatcgtagccgacaaacttaacaagaacaaatcccttatgttgccgcgtactttcaatcgtcaatggtaaaggctcacctgattgttgtaggtacaaggtatttcccttggcaaatcgttcatcaataaaatcagtagttgctaatacgcgcacttctccgcgaacaccatgagtatttacaattttaccaacattataatattccataaattcctcctgaaaagacaaaaactcccacagattagtgtgggagttttaaatttagtgacgatggtcattaattaataaccggactcgcttagagttagcccgtcgagattgagtaccctcgactattgttcgcaatgctgcggcaacgtgtccctgtcgaccaattagacggccaacatcattgggagcaacatcaattatataacgatggtaacgtccatcatctttttgggtaactgacaatgcctgtggctgcttcaatagcggaataactaaactacgaattaacgactcaatatctgtctcagccatgactgattatcactacttcttagcgtactttgcttcgtggtacttcttcataacgccagctgcttgaagcatgttacgaacagtatctgaaggttgagcacccttttgtaaccattccataacagcgtcttcatcaaacttgacttccttaggagtagtcaatgggttgtaagtacctactgaagtaataaaacgaccatcacgtggggcacgtgagtcagctacaacgatccggtagaatggacgcttctttgaacccatgcgctttaaacgaattttaacagacattctttgcacctccctgatttcttttaacagataataatataccagtgttcaaatagaatgtaaagtattttttcttgacaggcttaaattttttgaaattattttttctttcgtaatttacgaagctttttaatgcgtttttgcttgtcttttttcattttgcgcgccatgcggttcattgccatttgtcccatcttgccacctggcatttgtccaccaaacatattttgcattccattgaaattaccgtttgtaacctgcttcatcatcttacgcatttgattaaattgcttaatcatccggttaacttcaacaattggccgtcccgcaccagctgctaaacgacgacgacgactaggattcattagatcagggttttcacgttcttctggcgtcattgaaagaacaatggcccggatatgagcaaattgcttaggatccaaattaagattcttcaaggcaggattattagccatccctggcatcatcttaataatattttccaatggtcccatcttggtaacctgatccatttgtgccaagaaatcattgtagtcaaatgtgttttcacgcattttatccattgtttcttgagcttgctcttcatcaaaattcttctgggctttttcaattagggtcatcatgtcccccatacccagaatccgtgaagccatccggtcagggtgaaagacatcaagatcctccatcttttccccttcaccgacaaacttaatcggcttacctgtgactgcccggattgacatggcggccccaccacgggtatcaccatctaacttggttaaaacaaccccagtaatgttaagcttatcatcgaagccttgagctgtatttactgcgttttgaccagtcatcgaatcaataacaagcaaaatttcatttggatttactagttctttaatgtttgcaagctcatccattaattgttcatcaatctgaagccgaccagcagtatcaataatgacataatcattatgatttttcttggctacttccatcccttcgcgaacaatttccaccgggtcaacatctgtccccttttcaaaaacaggaacatcgatctggtcagcaacttgttgtaactgagtaatagcggcgggacggtaaacgtcggcagcaataaacattggccgcgcatgattttcattctttaatcgtaatgccaatttaccggcagtggtcgtcttacctgccccttgaagaccaaccatcatgataacagttggaatgtgcggtgctttgttaagaggaactgcttcttcccccatcagttttgtcaattcatcattaacaattttaacgatttgttgggctggatttaaccctttcagtacttccgctccggctgctttttcccgaacggtctttacaaagtcttttacaactttaaagttaacatcggcctctaaaagggcgagccgaatctcacgcatcgtttcccgaagatcagcttccgtaactttgggcttgcgtcgtaatttttccatcgccttttgcagacgatctgttaaaccttcaaatgccattttattcttcctccaagctttccagatgatttactaagtgattgagcgttgcatcgtctggatagttttctcggacgtatcgttgaattcgatccgcctgttgattacgaacttgaaattcagcatacaaatgcaatttggcctcgtaatcttctaatatgctttctgtgcgctttatattatcatatacggcttgacgactaacatggaaattctcggcaatttcgcccaatgagtagtcatccccgtaataaagctctaaataatcattttgttttttggttaataagggttggtaaaactcaaataatgaatttatccgataattcttttcaatttccatatcgtcatacctgcctagtcaacttcgactaatcccttgaacaggccataaacaaagtcgccagcatcaaacttctggaggtcatctaccttttcaccgagccccacatacttaaccggtaagtggagttcattacggatagcaaggacaattcccccacgagcagttccgtctagttttgttaaaacaatccctgttacatcggtactttccttaaatagtttagcctgattaagagcgttttgaccagttgttgcatccaagactaacaatacttcatgaggagcatctggaatttcacgagtaagaatgcgtttcatcttagctaactcattcatcaagttaaccttgttttggagccgaccagcagtatcaacgaacaagatatcatagttttcatcttttgcccgttttactgcatcaaagacgacagccgctggatcaccgttttctggtccggtaacgatgtcaacaccatcacgttttgcccatacatctaattgctcagtggcccccgcccggaacgtatcagcagccgctagaagaactttcttaccttgcttcttaaagagggcggccatcttaccaattgttgttgtctttccggctccattaacaccgacaaacataataacagttggtccttcttttgccatggttaagtcaggattttcgtcttgaccagctttatcgtaaagttcgaccattttttcaataatgacgttggaaacatcctgcttgctcttagcgttttgcagttttacttcttctcgcaattcatcactgagcttcattgccatatcatagccgacatcagattcaattaacatatcttcaagatcatcaaagaagtcttcatcaacatgccggaaattagccaagaacttatttaaccgtgccccgaagcctgtccgggacttctcaagcccgcgatcgtatttcttaactgtttcagattcttgatcctcttctggttcaggagaaggttgttgctcctgctcctcatcaccatcattttcttcagaattatcagtctcatttgattcttcagtagctgaggaatcttctgccacttcttctttagttggcattactggttcttcaactgttttttcttcttctgcaacgggttcggtcggttcaacggctgtttcagtttcagcagaattagaagatggttcttctgcagaaatagtttcttccggagtactagacgacggtacttctttttcagaaacacttgaggccgctatctcttctgagtgacttttctcgctagtatactcttctttttcttctttaaccctgttatgaagtatttcgtgagttccatccgggttaatcttttcctcatagctatcggcaggaggaatatttaccgtttccggatgaattggtgcagaagctggtgtcgcactcgtcgtatctgctgcttcatcttcatgtgcggtttcagattgaacaactgcgcttgaactatcaggcgttttttcctcttcttttttcttatgacggcgaaaaatatcaaataatcccatacttgaagcctcctaaattagttaattgtcactctcttgtaaagtatcaacaacgtccactgataccatctttgaaactcctgattcttgcattgtaaccccgtacagtacatcagcgtccatcattgttcccttgcggtgggtaatgacgataaattgtggaccttcagtaccaaatttgctgaggtagtgtgcaaaacgttgtacattgacctcatccaaggctgcctctggttcatcaagaattgcaaatggaactgggcggacttttaaaatagcgaatagtaaggtaatcgccgttaatgctcgctccccaccggataacaatgaaagatgttgatttttctttcccggtggctgggccataatatcgactccggttgttaataagtcatgaggatcggttaagacgagtttagcatgaccaccagagaaaatttgttggaacgtctcatcaaacttttgtgaaacctgattaaaggttgtaataaaccgtttcttgacttgggcatccatctcacccatcgtctgattaagctgagctcgagaggcgagcaagtcgtcttgttgtcccttcaagaaatcgtaccgttcacgaacacgctcatattcttcaatcgctccaacattaacttgaccaagatcatccaatccccgctttaatagcttcaaccgggtcgctaaggtctcttcgtccaagtcactcatctgttggcgagcttcatcaatggtcatggaatattgctcagataatcgattaagagcttgctcaaccattgattcatacttcacgcgctcttcatttaagttattacgatcatcaagggctgcccgctgaagttcttgcagacgattataatgtgcttcggcttgtgacagcttttgctcaagttcttcaagagcaactgaattatcttccagttgcaccttagcttttgcctgctcttctttagcatcttttaaggctgtctgtgtcgatttttcacttgttgattgactagctgattgagtcgttaactcagcgattgcaaccgtgaccttttctaaactctcctcagcttctcgccgttgacggttatactcttgactttggcgttgatattgttgaagtcgttcttcggccactgcaattttttgttgcatttgtgctaattgtcgtgcctgagtcgacgcatcattctgtaattcatcgatctgggtaagaatttgcttaatctttgccacaacttgcgtcaatttctggtttactttatcagcttgttcattattttgttgaacttgtgattcgtaatcctgatgttgagtgtcttgctgtttattttgggtttctaaaatctgtacccgattagtaagcgtctcatgcttacttgagatcaactggcaattactttcttgctcatgaaacttatcttgtaaagtctgaacttgttgctgataatcagctactacttgttcgttcgctttttgcgcttgttgtagtttagcaatttcttgctctaagtttgctgcaagctgttcctgtttttttagctcttcttctagttgcttagccatttgcttttgacttaaaagtcctgttcgttgactacgggtggctcccccagtcatcgctccactagcattgatcaactgaccgtcaagagttaccacccgtaccatatgacgacctgcacgagcaatctcagtggcatgatcaaggttgtcagcaataaccgttgttcctagtaagtggtcagcaataatctgaaacttttgatcaaacttaataagttctgttgctcgacccaaaaagccagggagaccagttagttgtggccaaatgtttaatggtcgccggtggctaagcgtatcaagcggcaaaatagttactcggccagcgcgagtcttaatcaagaagttaataattgctttggcagtagcttgccggtcaacaaccaattgctgaagctggcttcctaatactgtttcaaccgcttgcgtgtacttggcaggaacatcaaataattcactgactgctcccgccaatccaggaaattgctgccgttgccgaaggacttcttgaactccccggtaatagccgctatattcatcggccattgactgataagcgttaattcgcgacttaagcgaccgtacatctcctaatgctgcataccaatcacgttgttttgtttggtacccgtaattaagtttttcacggtgatcttgagctgcttttagtttttcactgacagtctgtaggcttcccttagtaatggctgcttcttgttggtagcggtcatattcttgattaatttctgcaagctggttcttagtagcgtcaagttcctcgacattctgacgttgaagactcatcgcctgttcatgattacgtgacaagaaagattgctgattatgaatcgttgttctttcctgcatcaagctaacttgttggttacgtaaatcctccacttgctgttttagggtcgcgatccgctcactgctactcatctttctggctgtttcaaactcagcttgctgaccattaatcaacgctttttgttcagccaattgctcgtcatttgcctgttggtttgccttaacctcttttaaacgtgcattgagttcagcctgttgggtagttaaccgccgttgctcattttcacgttgttcacgacgaacactagaaacagattgctgattctcatacttagcaattgcctctgtctgatttaagataatcgcttggagacgatctttagttgcgtttagttgttgacgcttttgcttcaaattatcaagctgttgctgatcgcggtctgcttgtccttgatagtcccttaccatcgcttctgcttgatcgagcttggcacctaatttggttaacttttcatagtactcgtcataatgacgaaccgtttgtgtccgatcaagcacatcaaattgtttcttttgttccaagtaatcttgggcaattgcactttgctcttctaaaggttcgatctgcttttctaactcactaataatgtcatttacccggttaaggttttccatcgtcgtagtaagtcgcttttcagctgtttctttattcttcttatacttggcaactcccgcaacggtttcaatgattccccgccgatcaattggtttaccgttaaaaatttcttcaatccgtccctgggaaataatggaaaaggattctcgacctaaaccagaatcaatgaataagtctgtaatgtcctttaagcggacgttttggtcattgattaagtactcactatcaccattgcggtatattttacgagtaatggtaagctcagtaaattcactagctaagtaatgatcgctattatctagcgtaatcgaaactagggctcggtttaaaggtttacgatctgatgacccattaaagataacatcagccatccgatctccccgtaaatgatgagccgactgttcgcccattacccattgaatagcttcaataatattactctttccactaccattcggaccaacaatccctgtcattccgggctcaaatttaattgttgttttttgggcaaaggatttaaagccgtccaaagttaaagacaataattgcatcagttattcctacttactatttatttttatttctcatattatcaagtgcctgttgtgctgcttgcatttcagcatgcttctttgatgagccctttccttcaccgataacgtcaccgttagcagtaacatttactttaaattcagggtcattttctgttccgctttcctccaccaaatgatattcaatggcaatgtcaccgtcacgttggagaaattcctgaagactagtcttggcatcaacagcatgatcaaaccagcccatatcaagtttaggaaagataacccgttggacaaatttttcgactgctggtcggccttgatctaaatagagggcaccaataaatgattcaaaaatatcacatagcaagcctggccgttctcttgcgccggccatttcctcaccatgacccaagcgaatatattgatcaaaatgacattccttggcaaatttagaaaaactatcttcacataccattgccgctcttaagcgagtaagttttccctgcggcaattcagggaaacgtttatatatatattctgaaacgatcagttccaacacagcatcgccaagaaattcaatccgttcgtaatattttaatccttggttaggatgttcatttacatacgaagcttgagtaaaagcttctgctaataaagcaggattatcaaaatgaatattaaattccttggccaggtagtcttgtaattctttgatcataaaaaattcctttcgtttttgacttaaaattattaaaaatgtctaaggcctattatactaaataacccgctattccgcaggtaattttaataatattcgaaaaaattaaaggctgtgaaaaaactttcgccttttctcagccccttacttttctaccttaataaaataattaaacggtttgattagttggcagtatgttctgcaatgtaatcaacaacttcaccgattgtacttaacttttcagcatcttcatcattaatttcttcgccaaacgtatcctctaattcgagaacaaattcaacaaagtcaattgaatcagcatccaaatctgtctttaagttcaaatcatcagtaatcttagcccgatcaacatcaaaatggtcagcaacaatctctgaaaccttattaaagatttctgttttcttattatcagccattattattaacctctctttactagttcgctacttattctattcgtttttcttagaattgtctagattttcggtgttatcaaaaaattcaactgttttttcaatcacacccgttttgatcatcgttctgatttgactaattgtatttttcactgctaaagcatcagcagatccatgagtcttaacaacgggggccttaagtcctaataagactgccccaccataagttgaagcactcattttttgcccgatttgatggaaaacgggctttagcataagataacctaacttagcacggagaccaccatgtaagattccatctttaattaacgtcatcatcatcttagcggttccttcagtcgctttcaaggccgcatttgccgtccacccatcacttacgacaacatctgccttgccaaacaggaggtcgccagactcaatattgccgacaaaattcaaatcgtctttgctattgaggatttgccatacttctttatgtaatttgtcacccttatcttcttctgccccattgtttaatagcgcaatccgaggattcgcaactcccaatacattttcggcatagaatttaccaaggtaagcatattgttccaaatttttctctttactttcagcatttgcaccagtatcgaggtagacaaaattatgtcgactagcacccggcttggcaattggcaaaatactagtgagtcccggacggtcaattcctttaatacggccaacaatgaagaggccggccgccaaaattgccccagtgtttcccgcagaaaagaaggcatcagcttttccttctttaactgctgttgccgcgcgaacaattgacgaatctttttttcgtcgaatcgcccggactggttcttcacccattgaaatctcttcactggtagcaacaatattaagccgctcattattttttattaagggtttaaccttgtctggatttccataaaggtcaaattctaggtcggggtaaaggtctcgggcctcttctaccccttcaatgattacttggggagcattatctccacccattgcatcaacagcaattttcataaaatttcctcctcatattagtcaaagtgcgtctccagttcatgacgctttaaatataaaacaagtggctgattttcattgacctgatcccaattgggcatccctaataggttcccagcatcagcacgggcaatttgcagcattttcaaatcagcaaccggatcacccactttaaattctggcatccccgattgcttttttcctaaaatatctccagatccccgtagtttcaagtcttgttcagctatcttaaatccatcatcggtagcaaccatcgttttcatccgggcttttccttcatcagttttcggatcggcaattaagagacaataactttgtcgactgcctcgaccaacccgaccacgtaattggtgaagctgtgcaagcccaaaacgatcagcatcatatataaccattaccgttgcattaggattatcaacaccaacttcaataaccgtggttgcaactaaaacttgaagctcaccagatttaaactggcgcatcgcttcatctttttcttccgtccccattcgtccatggagtaagcccactttataagctggctcaagatcggccgatagctgattataaagatcagtcgcgttttgtacatctagagccgctgattcctcaatcaaaggactcacaacatacgcctgtgctccttgctttaattgttcacgtaagaaatggattgctgcggcatgttggttagactgcagccactttgtttgaattggttttcgaccagccggtaattggtcaattatcgaaacatccatttcaccataattagtaatcgctagtgtccgtgggataggggtcgctgtcatggctaatacatcaggatgttcgcctttttcacgaagttgctgacgctggttgaccccaaagcgatgctgttcatcagtaattaccagaccaagattagcatactcaactccatcttgaattagcgcatgggttccgacaatgaggttgacatccccccgcttcatcgccgtcaatagttcccgatgttgcttagcagtcaatgaaccagtcagaagagcaacctggacatgggttccttcaaaaattttcgctaatttctcagcatgttgtcctgccagaatttctgtcggcgccattaaagctgcttgataaccggcagtaatagctgcataaatggcaatagcagcaacaattgtctttccagaaccaacatctccctgtaacaatcgattcatctggtatggttgacgcatatcacggcaaatttcattaacaacccgtttttgggcatcagttaattcaaatgggattccgccaataaattcttttaactcgtcattatggtataaaatccgctcgccatcttcttgacggtgggcacggcgaattgcttgcagtcgtaactgaaacaggaaaaactcttcgtaagctgctgttcggcgggcggcttttgcagttgcctgagtttgtggaaagtgaatttccctaatcatttgtcgccgatccattaaccggtatcgttgacgaatcgtttctggcaaatatgttggaatgatattggcatattcctcgtaagcttgacgaataaaactttggaggacattttgccggatatgcttattcaccgcatagaccgcaccaaactcatttcgatcatcagctttttccttaagaaacttgtttcctgttacttgacggcgagatgcatcccatttccccattacagttacttgctgatttagttcgatttgctttttaatatagggctgattaaaaaaagttgcgatcaccacttcattacctacctgcattcgaaaggtaagccggttgcgccgataaccatagcggaccaagagcggttctgacactactactccttgaagagtaattttctgtttatccttggcgctttcaatgtctgtaggcgtgaaatcgttatagcgagtgggataatacgtcaacaaatcttcaatagtatctattcccagagtagctagatctgctacccgcttaggaccaactccttttaaattggcgacggaatccgttaaactccgcaaatctttcacctcttttttaacacaaccagtaaccaaaataggagtgggaataaaagtagtcctttattaacccacccctataggaattaatttaatgtgccgctattcaaccgaaatcaggtatggataaactggctgaccaccatcgtaaatctgaatatctaattcatcatctacttcttcaactgctgctttaatctcttcagcagttttttgatcaccaccagctccatataagatcgttacaatttcactatcctcgtcaagcatggctttaaccatcttaatagcggcttctttcagctccaaatcagtagtgacgattttaccatcaacaattcccatgtagtcatctttcttaatttcacgaccatcaattgttgtatcacgaacagcattagtaaccgctccactggcaaccgtatttgtattagcttccatatttgcttgattttcgtccaaagatgcttctgggttgtactcaagcaacgcactcatcgcttgggcaatcgtcttactgtggacaatttttgttggaatatcagcaacttcagcagcttgatcagcagtcataaagatgttgccgttatttggcagaacaatagcttgcttggcaccactattattaatggcatcaagaatatcttgagtgcttgggttcattgtttgaccacctgtaatgatatgggtaacacccaagctctttaataatttcgctattccttctcctgatgcgacggcaataacagctgtctggaggtcctttttagcttctgcagctgcttttgccttctcaattggcgactcactgtcagcgtcttcttcatctttttccatgatctcttcttgttgccaaaccatgttatgaatttcaattgtctgtaaatcaccgaattgttgaccccaagataaaactttaccaggatgctcggtatgaacatggacccgcacaacttgatcatcgtttagaacaagtaaactatcgcctaagtcagctaagtagttatagaaagtatcatagtcaaacttttgagtcacttgtttacccttaccaagtcgtaccaacatttgagtacagtaagtatacttgatatcttcaggattaagctttccttgaacgctttggtgatccatggcgtgaaccatctcatcaatttcagcattgtcaggtttatagtcatcacttttatctacgcggccactcaaggcttcatcaaaggcttgaagtacaaagacgagtccttgcccaccagaatctaccacgccaacttctttcaggactggcaataaatccggcgtctttttaagcgcttcttcacctgcttcataaatagtatgcataatctcaacaagatcatcagtctctttaatcttattgaggcctgcttgagctgattcacgaacaacagttaaaatggtaccttctgttggcttcatcacagccttgtaagctgtctttgcaccattagcataagcattaacaaagtcagcagtagataaaacatccatgccttctgttgcctttgcaaagccacggaaaatctgcgataaaataaccccagaatttccgcgtgctcccatcaaaaggccctttgctaacgctgcactcaggtcgccaactctcttactggtttcgttgcgttcgtacttggcaccgcttgccattgaagaagtcatgtttgtcccggtgtctccatctggaactggaaaaacatttaatgaattaataaattcagcgttcttaccaagtttatcggcggccgcctggaccattttaccgaattcaaggtttgtaatttttgttacagccaattcgaaattcctccccaatgctcgcttaatcttctagtgtccgcacaccttggacacatacattaactgaatttgccgtaataccgagcattgtttcaagattatactttacctttgcttggacactttttgatacttctgagatctttgtgccatagcctacaataatatttacgtcaacagctacaccattatcttgctgccgaacaacaacgccgcgcgcaaaattttcacgacgaagaatttggttaaccccatcacggagggggtttcggcttgccattccaacaacaccgtagttatcagtagcagccccaccaacaactgatgaaatcacatcattatcaatgtcaattgtacctgacttagttttgatttttactgccatcgtcatggcctccttataaaattaccaattgattttagaatcctatgatactaaaattcacaattaaatcaataccatcataccatagcatatttcactaaaaaagtaactgatggatatttttgcagtcgatcaatggggttaatcaattaacgtaaaaaataagccgcccaaactggacggcatcattttaattaaacccgagtcactttacctgacttcagtgtacgtgctgaaacgtataccttcttaggcttaccattaactaaaatggttaccttttgcaagttaggcttccagctacgccgacttgagttaagggcgtgagaacgcttattaccaaattgcgtccgtttaccgttgataaaatctttagccattggtgataccctcctctttgcttcataattttttcgtttacgcaaaactgcgatgtaactcacctaattaatctaccataggcatcgtaacaatgcaatagttttctttcaagtaattttccttgacagggtattttcccctcaaaaacctattttaattggtcgctacactgaattacagaaataattccactttcaaatgaaaaatgattttcttcagctgtaaattcattgcttgtccacgaaaatagaatttgactactccagttttgcagtggatatttttcgtcttttaacgtaaggcctcgaacaggagtaagattgacaaaggccaggtacttcttatgcggcaggcgagaaatagtgtaatcccctggcaagtagtaagagacaacattttgacagtcaataatcttaatcttggttaagtatggtttaaattcactctgcaacggaagaaagaggttagctaataaatgatctaagcgtcctcccgttgcaccaaaaatttcaatttcatcagcctgttcttggattgcaaatttcacgcccaattgcgtatcagtataatctttttcaggaggataagtttttatacgagtaattttaccttctaaaccttgcaattcctccccggtaacggaatcaaagtcaccaattgctaaaaccggcttaattccccaccttaataatcttaaagccccccggtcaaccccaatccatttttcatctttacgttgcaaaatcaactcggttggaaccatttcaagcggaccgccaactagtatatttactctcattttttactcctaaaaaaatggatcttcaatattcagacaaatccgaactagaagatccatttttgttttttacttaatgtgactaattacttagtagcatcttcaagagccttgattcgttcagcaggatcttcagcgttaaagacatatgaacctgcaactgctactgtagcaccggctttgtagcaatcgacaactgtcttatcgttaactccaccgtctacttcaatatcgaaattatagcccttttcttctttaattgcgtttaattgggcaatcttgtcaacggtttccggtaagaacttttgaccaccaaatccagggttaacagtcattaccaagacttggtcaaccatgtgtaatactggttcaatcatcgctactggtgtacctggattaataacaacttcggcttttacgccaccgtttttgataatttgaagagcacggtgaatgtgttgagtagcttctacttgaacaccaataatatcagcgccagcatcaatgaacattggtaaaatatgttctggactttcaaccatcaagtgcacatccaataccatgtttgtaattggacgaatagccttaacaaaacctggtccgtaagaaatacttggaacaaaggtgccatccataacatcaatgtgtaagtatggtgcaccggccttttctaccttttcaatgtccttttgtaaatttacataatctgcacttaaaattgatggtgcaactttaatcatcctgattccctcatttcttataatttggtttttgattagcaatcaattcatggaactgaagataatcatcataccgactcttcatgattataccattgtttaccgcttccttcacagcacattgtggttcttttatgtgaaggcaaccccgaaacttacaatcagctgaaattttagccatttcagggaataaatgcggcaaatcatttaccgtcatatcaaatgtttcgtacgatgaaaaacctggggtatcggctatcagagcaccgttaacatctagtaaacttacttttcttgttgtatgccgtccccgttgaagcgcttgggaaatttcaccagtcgctaattttaattggggagccaaatgattaagcaaggttgacttccctgctcctgtctgccccatcattgttacaatatttccctttaattcttccatcaaacttactaattgatcagggttaaagggctcacgggccgcataaacatggtagccaattttacgatagccctcgatcgttggtaaaagttgttggtactcatcatctgtcagtaagtcagtctttgaaaaataaattaaaggagtaacatcttgggcttctaaagcaatcaattgacgatctaaaaggttagcggaaaatgctggttctttagctgaggttacgacaactgccatatcaacattagcaacaggtggccgcaccaactgattgcgacgaggcaagatttttaataaatacccttcctgttgattttcagcactgaattcaacatgatcgccaactactggcttgatctttcgttgacgaaagtttccacgcgcccttgtccgataaatcttttcatctgcaattacatcataaaagccacttaatgattgttggattattcctattttcaaactgcacctccattatccagtaatatttgttgcactcataatcgttcgtccattgcgaacaacacggtatgcacctgtttgtccttgtttaagggtaaatggcacattaattgttgtttcctgattaattgtaatatcttgatactccattgttaaattatggttggcatctctgatatatacctgtacacggttttcacgctggccaccatttccatcgaatggaatgttaatctgaatattcgtcgtctttgtttgattaccagaattagcaatggaaaccgttaacgtatcaccatgatttaatgtcgatccggctcgcggcgtctgattaatcacatggttagtcgcgattgtttttgattttttctcttgagttgtcaattgcaaattatttttatttgcaaactgttgcacagcactaatatcttgattcttaaagtttggaatcttaattggttctttccctgcgcttacccgaaaaataattgtgttagcagcaggcttaacaatcgtaccttttttgtggttttgtctgataatctgtcccttatcgatatcatccgaatacactggttcttgatgaacttgaaatcccttgcgacgaaggttagcggctactgaagaatagtcctcaccaacataatcagccatttgcaattgcttaactcctgtactaaccgttaaattaattggggtactaacacgggtcttatggctgacgtcaggattagttgaaacaattcggtttttatcaaccgcctgactatttactcgagtaatcttaccaatccgtaagttttgctggtgcaatcgttgttctgcctttagcactgtcattccttctacatcggggatgattacttgacggatcaagaaccaccagctacagactgcaatcagcacaatcatgccaagcgttccactaacaatcccatattttttccacttttgcggtttagttgatggatcaacggttggtgaatcagttgacttctttggttggtaatcatcagcttttaggtgtttaatatctaacaccttagtttctccattatcatcttgttggatctttaaccgcggctcattagctctttgtggatcaaggacggttttcaaatcagccgccatttcatcaactgaactataccgctcagctggttcctttgctgtcgctttaatgattacgttttcgagtgcttgaggaatttctttattctgttcacgaacagaaggtatttcttcgcggaaatgcttcaaggcaattgagacagccgtttctccttcaaacggaacctttcctgttagaagttcaaacaagataattcctagtgaataaatatctgattgtttagtagcaatgcttcctcgcgcttgttccggggataggtagtgaactgaccccatcaaggtattagtctgcgttaatgagtcttgcgatacagcaaccgcaattccaaaatcagtaattttaacgtttttattttcatcaattaagatattttgtggttttaagtcccggtgaataatcccatgagcatgggcggtcgcaactgctgaaagcacctgttccataatatcaataacttgtggaagtggaatcggatagtgcttttttatatatgctttaaggtctgtcccctttacatattgcattaccatgtattgcaagccatgatcctcatcaacgtcataaattccaacaatatgaggatcatttaattgcgttgcggccattgcctcccggtgaaatcgccgtttagtacttggatcgtcccgtaagtcaagacgcaatagtttaacagaaacgtctcgatcaagaaccatatcatgtgccaagtagacattagccattccaccttcacccagtgaccgaattatccgatatcggtgaccaatttcatatccaggattcatttcctatccctcctggttactattaatcccaattaaaacggtaatattatctggtccgccggcatcatttgccatttttataagttgagcacatttctcttcaagcggtctcggcaattcaatcaccttgataatccgctccttagaaacagtcttaaacaagccatcagaacacattaacagttgatcaccttcatttaattcaaagcggtttacatcaacttgtgcatcctgtgagattccaattgcccttgtaattatattgctctggggtagctttagtgcttcatcttctgatatatctcccgtttttaccaattcattaaccaatgaatggtctactgtaatctgcgttaataggttttgatgaaggatatatcctcgactatcaccaatgttagcaaccacaaccgcatccttaaatgcaatagcggcaaccattgttgttcccatcccctgcaagcgaagattacgtttggattgcgctaagattttattattgattaattgggtttcacgagcaaaccagcggatcccttccatcgaagtctgcggaggcctttttttaaactgactccccaaagtcgcaactgtttgctctgcagcgatatctccgctacgattgccaccaattccatcagcaataaccattaattgattgcctagcttgttagtaaacacagcaacccggtcctggttttgctttcgttggtggccgatatctgtttgataagcagctttcattaatttattatattcccttcttaaggctactgacgaagaagccatcagaatcaaaatcactcggtaatatagttaaggttggtgagtgacgattatccttaacttttcgtgcagttgttgtttttactaactcaaactccggatgttcagctagaaacgcttgaacagtatcatcattttcttgctgtaaaattgtgcacgtgctgtatgtgattataccgccttttttaacttttgcggcaaccgcatttaaaattgctaactgaatcttatgtaattgcttgctatcatttagcgtttttgtataacgaatttctggcttccggcgtaaaagtccaatcccactacaaggcgcgtcaactaagaccttgtcaaaactttcatcatcaaaaagttgatcaacttcccgtgcgtcaagggcatgagcagtaactcgcttttcaacccccagtcgacgagcattcttttcaatcaatctaaccttatgttggtgaatatcaagtgcatcaacgtggccgtcttcattagtgagggcttctgctatttgaacagtctttccacccggagctgcacaagcgtccaggactttatcccctggctcaatatgcatgctttccacggctaacatggcactttcgtcttgaatagtaatttcgccatttttgaagagatcggaactgataatttcacctttagtaattactaaagcattttgcgcaacttgactttcttgatattcaattccagcagcatctaaagtttgtttgacggtcggaaggtcagttttgacgatgttaactctaattacctgatgagccggctcattaattgattgaagtactttttcagtattttcttcgccatattccctagtcagctcgttgactagccaccgtgggacactattttcgatacttaaccgcaaatcacgttcatcaatttgccgcaggtcaggtaatcctttccgcaaaatggcatgtaaaacgccagtgacaaactttcgaatacctggatttcctcgacgtttagctatttcaatactttcgtcagttaccgcccaatccggaactcgttctaaataatgatactggtaaagtgcagacaagagaagcgtctttacccaaggatcaagccgttttccctgcacaaacccatttagccaatattcgagggtaagtttatgctgcaaaacaccataaataatattagttgccaaccggcgatctttatctgccaacgggtacctttttaataactggtcaacctgcaagtttgagtatgcaccattttcgacaactccttcaagcgccactaaagctaattcacgcgcattttgcggttgaaatttagtcttcacttacaacttggcctccctctgtaatatctttatgtccattaaggtaagaagtaatatccatcgcctttttccctgctggctttaacttattaatctggtatgtcgttccatctccagcggcaattactaattgatgcttcgtgacccgcactactttccctggttcaaggtctgttttttcttctaatggggtcacatcataaatttttgtgcgtaatccatcaataatcatattaccaagaggagccggccgtaatccccgcaccttcgcatcaattaaccgtgccggaagtcggaaatcaatctgttcttgttcactagtaatgttgggagaaaagactactttatctggatcttgagcgaccggattaacatccccgctaataagtttaggcagcgtttctaacagcaagtctcttcctagcaaactaagctttttaaacatagtgccactatcatcagtgtcttcaatcggaatagacctttgtgaaataatatcgcccgcatccatcttcttaaccatgtacataatggagaccccggtttctttatcatcattaataatggaatattgaattggggcccctccacgatattttggcagtaatgaaccgtgaacattgattgctgcaattttagcagccgccaataactttgttggaaggaattgcccataagcagcagtaatcattaagtcaggctgcaaattaataattttctccatttcaggacttttgctgagtttagctggctgtaagacttcgatattatattgttcagctaattctttaactggcgattgatgaagagtacgtttccggccgatatggtggtctggctgggtaagaactgcttgaatatcgtattctggattatcaattaaactttgtaaaatcggaacagcaaactcgggtgttcccataaaaacgactgatgttgacattaataacatcctttctttcacataaaatactgtggatctggatcgatacttacttggacatccttaaaaccgcgactttgcgtatcctgaagaatatcaaacaatagctgatgcaagtaaggatccttcttatatttgatgacaatttggtaatagtaacgacgcttcatccgggcaattgctcgcggagtggggccaagaataaccgtcgaagataataatccctgctttaggcgaccatagatatctgccattgcccgagctgctttggcttcttcgggatgactggccatcaaacgaacggtgtaatagtatggcggataacttgcttgtcttcgtagcatcatttcctggttaaaaaatttttcgtaatcgtgcattttggcatcttgaatagcgtaatgatcagggttatatgtctggataataacttccccctgcttatttgcccgaccagcccgaccgctaacttgacttagcaaatcaaaagtccgttcactagcacgaaaatctggtaagcctagaccagtatcagcatttaaaacccctactaaggtaacattagggaaatcaagcccttttgcaatcatctgggttcctaataaaatatccgcttggtattgaccgaactgtcgcaataattttgcatgcattcccttccgccgtgtggtatcaacatccatgcgaataatccgggcctggggtaataattgatgcaattcttgctcaaccttctctgttccagtcccataatagcgaatctgatgactatggcaattgggacattcacgggggattggttcttcatgaccacaataatgacatttcattgtccgcgtatccatatggagcgtcaaagaaatatcacaattaggacattttaaaacatttccacaatcacgacacatcataaaggatgaaaatccccgtcgatttagcattaaaatactttgctcgttcttttgcaggcggttatttaattcggttaatagtttttgagaaaagttactctccccgtactttttaatttcatctcgcatatcaaccacttcgattggtggcagttcctgtttatttacccggtgaggaagacgcaacaagtgataaacgttttttactgctcgcgcacgactctccagactaggagtagcagagccaagaactacaggcgcttgattatattttccccgccatttagctacttcacgcgcctgataacggggtgattcatcttgtttataactagattcatgttcttcatcaagaatgattagccctaaattagttaacggagcaaagactgctgaacgggcacccacaactacttgcgcttctccacgttcaatccgtcgccattcatcatatcgttcaccattcgataaactactatgtaaaacagcaaccttagagccaaatcgtcgccgcacacggttaacaatctggggcgttaatgaaatctcaggtacaagcattaatgctgtctttccctgttgaagagcattagcaatcgattgcaagtatacttctgtcttgccactccccgtaactccttgtaagaggaaaactttagggtcatgattgtcgattgcttgattaatctggttaacagcattttgttgatcggcgttgagctgcagggggctgctaaatgagcatcatcaggagtgccctgcatagccaagggttgtcgatatacttcaactggtgttttttctagccatcccttctgttgtccctgattgaaggtggctgcttttaaaccagttttatgttcagcatccttttgcttaacaacttgactaccaattgattgtaaatatgaaagaagacggttttgagcatgagcattagcatgaagggatgcgcgctcatcttccagttgttcaaaattaagcaaagagcgaataccagtcaccgttttagctttggctcgatcctccacttggtattcaatcgttatctttccttccttttgcagtttgaacaatttacttaagattgccggtttatcttgtaccgccgccatttctaattcatctcgcccatgaaaaatgtcaaaggcaacatactcgtctacttcatctacaattcgaataattctggtagtcttagccttcaataagttaggcaacatcgtatataagcaagaaatccaaaaagagtaagtagtatcagctaaccatttgctaagattcattaattcaggattaattaccggttgaagatccattatcgcctgaattggtttgagttctccctcatattgggatgcattgtcaagggcaacaacaaatccttgaacagtacgttttccctttccaaaaggcacaatcactcttactccaacttgaatttgtttttcaagttttggcggaatctgataagtatatggttgatttgtttgcattgttggaacatcaacaactacctgtgccaactctggcatttaatcacctgactttaattttgcactaattaattcaataatctcgtttgcaattttagctttagattggcgggctaatttaattggcgtttgatctttttgtaagatggtcacttgattctggtcactgccaaatgctcccatatctcccgccacactatttgcaataatcatatccgcatttttgctagcaagtttacgattagcattttctagaagatcatttgtttctgccgcaaacccaacgatgtattgaccgttttgcttcatcttcgcaatattctttaaaatatcaatagtttcagtaagcgcaatggtaagatgcgggttaccatcttttttcttaattttatgatcaactatctcaactggacgatagtcagcaactgcggccgccatgattaaaatgtctgcctgcgcaaaacgttcttttaaactggtatataaatcttcagttgtgattccgcgcacaacttcaatcgctggtgattgtggaagggggacggtaacttgaccggcaatcaatgttaccttagctcctgcttggaccgcggcgttagcaagtgcaatccccattttaccagaggaccgattaccaataaaacgaacaggatcaatattttcacgtgttccaccagcagtaacaatcacgtgtttgccctttaatgcttgactgctagctaaaaaatcttctatatattggcaaattgctgctggttctggcaaacgcccgtgaccagcatatccttcagctaatcttccactaactggcggcataatattgaccccatcttgtttaagttgagtaatgtttcgttgagttgcgggggccaaccacatatggctattcattgccggaactacaattttaggagcattagttgctaataaggtggtagaaacagcatcatcagccagtcccattgccattttagcgattatatctgctgatgctggtaccactattgctagttctgaccaatcagctaactcaatatgaggaataggcgttgaatgctcatcccataggtcagtaagaactggtgctttcgtcaaggcaaaaggagtagcaggagtgactaacttagtagcggcgtcagtcattcctacgcgaacctcatgtcccattttttgcagtccacgtactacttcgattcccttgtaagcagcgatactgcctgtaagatacactgcaattcgtgtcattatgtcacctcaacttattttttcttaattgattatagcatttttagaagcaaaaaaggggccagtgacaatcctgccctagtcccttacttttgtttatccagcttaatttaatcctgtaagtcttcagtatgatcaggatcgatcgtaacttttccagccaaaatctcttcaagggccttcccaactgacttgcttgaatcataatgttcaagtaatggggcagctcctgcatctaattcattggcacgcttactagcaagcataactaatgaataacgagaatcaatatgttttaataattcatcaactgatggaaaaaggatcatttttcggcatctcctaacatttcaagataacgtggcattacacgggtaacacgaagccgttcagtacgaataatgtctttaatcttttcaactgcatttggtacttcgtcattaactactgcataatcatagttttgcatcatttgaatttcactaaatgctttatgaattcgtttattaatgacttccatactatcagttccccggtgaatcaatcgttgttttaattcatccaaatcaggaggggttaagaaaataaacacgccatctgggcacttagaccgtacttgcattgctccgttaacttcaatctcaaggaaaacatcttttcctgaatctaaggtctcattaacatattttaatggggtaccgtaatagttgtcaacatacttagcatattccaacatcccaccagtttgaatttggtgttcaaactcttctttgcttacgaagaaataatcaacaccattaacttctccaggacgtggttttcgagttgtcatcgaaattgaatattgaaaatcattatcatttgaatcaaagatagcttttcgaacagttcccttcccaaccccggaaggacctgaaagaacaattaacattccacgatttgccattataacgctcctatttatttaatcgtattaatactataatgcactagattagtactgaaatcaagcacctgaataacaaaaaatcattgagctttttgcttgcatttctgaatgtatgttcgtatactataatcaaacgaatgttcggaggcgcgattatgcaaattgaacaaaagtctatttttaaatttacgccacaaattattagtgataagcttcggcatctttttgaagaagcacctgctgacgatcagcaagcagggttacttactccccaacctgctaaacaacgacaattatttttaaaacgagccattaaagataaaattaaagcaacgtttcagctaatgccaatcaacaacgatggctatcccgtaaacgttaccggtaacatcgcccaattagcgaatagcaatcgataccttattacgaatcaaaatgtaagttatgttgttaactttgatcaaattagatacatcgcgaatttataatattggatttaaagagagactgggaattagctcagtctctttattgttttaaagatatttatacagtagctgcctggattccgatcgttgataaggcaccccaataggctagcttcgcgtcgtagctatcctcgtggaggaagacgaagtcgcaagtgacttctttcccactccctcttttttattttgccatattaagcaattcttgcgcatgctcttttgtcaactgagtaatcttttcacccgatagcattcgcgcaagttcttcaacccggtcgttttctttcaatggtgtaactcgagtagttgtccggtcatcatggacagatttcttaataaggaaatgatgttgcgcaacggctgctacttgtggcaggtgcgtgatacataaaacctgtgaatgttgagcaattaagcgaatcttatcagcaattgcttgggcaacccgtccgctcaccccagtatcaacttcatcaaaaatgatactagtaacgccttccttttgcgcaaaaattgtctttagggccaacattacccgtgacaattcaccaccagaagcaattttagctaacggccccattgattctcccggattagtccgaatataaaattcagcctggtcaattcccgtcggtgtaaattgttcccgactttgattagcaaagtgaacttcaaattctgctttttccatgtaaagctctttaagctgctggtgaacttttttaccaagctcatgagcagctttttgtcttacctgactcaatttacgaccggtctctcgaatcttattttcggcttctcctaaccgttgctctaggtcactgctagaatcagccgcggcctccatcgaatcgagttcttttttgatcttatcataatacttcaaaacatctgccaatgtatcgccatacttatgttcaagatcaccgatagtagttaaccgttgttcaatctgagctaaccgttcatcatcaaattcaagcatgtctaattgttgactagcttcattcgctacatcttgaagagcgtaataagcatcattaagagccttactaagattatcataagcatcatcaaattcagcaattgcattgattgagtccatcaccgtggcaacttgatctaaaacaggcgcttgctcaccttcattaaaggtcgtcacagctagttgaagagcattattaatttgttgaaagtgttccaatcgatcacgttcactaattaattcatcttcttcattttcttttagattagcttctgcaatttcattgacttggtaccgaagcatatccaatcgctgcgcccattgttgttcatttgcttgttttttatttacagcagctttgagtttagaataagcttgatattcttcttgatattttttaagtaagggctgaacctctttagccgcaaattggtcgagcattcctaaatgagtctcaggttgcattaattgttgatgttcattttgcccttgaatatcaactaatcccgcaccaatttgacgaagagttgccgtattaattagttgaccattgacccggataatattgcgaccattgcgatgaatttcacgggagacaattaagatcccatcttcatgatcaattcctagtgattcaagtagtttatcaaattcaggatcatcaggaattgcaaattgtccttgaaggcttaatttttcttctccacggcgaatgaattcctgcgatccacgaccaccagccagcaaaccaactgcatcaataataattgactttccggcaccagtttccccagttagaacagtcatttggtcagcaaaagttaaggttaagtgcttaataattgctaaattatcaattgtcaattcttgtaacaaaaattttcacctcgcctagtcgagcattgcgttaagcttttcttctaatttaattgccgcttctggagacatacaaactacaagaacattcccatcatcaccaattgttgtgaagaccgttggaaaatccatcttgcgaattaaggtagctactaccggcccattccccggatgaactgttaacgctaagaaacagtcattgcgctttaattgttccaaactgtcttgaagggtctgagctaactgattttcatgtccttgatgatgatatgctggcaaaccataacgataacccccattatccgcaggaatctttatcagttgcatttctttaatgtcacgcgaaatagtcgcttgagtaactgtcaatcccatttcacgcaggcgttcaacaagatcttcctgccgctcaatgctctcattagtaatgatttcacgaattttttgttgtcgttctgcttttttcatggattaagtcacctttatttattccttatgatttaaatcatcatcagcggttgcaataaccttatcgatatttacttcttcggcaacaatccccggattttcacttaggcggaggtgaactaaaaattccatatttccttgtccccctttgattggtgaataatctaatccaaggatatcaaaatgatcttcacgggcaaaggtcagcacttcttccaaaactgctctgtgaactttatgatcatgaatgatcccatttttgccaacatgctcttttcctgcttcgaattgtggtttaattagggccactacttcaccacccattttcagtatctgagccaaaggtggcaagatcaaacgaagggaaataaacgaaacatcaatcgaagcaaattctggttgaccactagtaaaatctgctaacttactgtaacgaaaattggtctgctccataacaactacccggggatcttcccgcaattgccaaaccaactgattagtcccgacatcaagagcgtaacttaacttcgccccattttgtaacattacatcagtaaagccaccagttgatgatccaatgtctaaaaccgtcttgtccttaactgaaatatcaaaaacttttaatgctttcgctaatttcaagccgccccgactaacatatggcattttatggcctttcatgtgaagggtggtggtaatcggaattttttgtcccggtttatctaatcgttcattatttttgccaagaatttctcctgccattaccgcccgctttgcttgttcgcgagagtcaaacagcccttgttggaccaataatacatctacacgttcttttttcataatccctttccttatttaaaatatgctaaaaagtcatcataaccagcaaatgacttgccagtaagcttttcaagattcttttgattttgattagcagcagttaaagctatctgtagctgctcctttgcaccatctatgccaagtaatcctggataagtatttttttgctcatcagcatctttgtgaacagcttttcccatctcttcagtagtactgaggacatccattaaatcatcatagatttgaaatgctaaaccgtagttttcaccaaatgctgctagctcttgtttgatttcagcagattgatccatcataatcccacctgccaaaacagcatagcgaatcaattcccccgttttttgacggtgcaagtatttcaattggtttaaatttaaatgttggtgttcgccttcaatatcccgtgcttggcccgcaaccattccagatggtcccgcggcttttgcaagttcaagggtcaactgactccgaacattagctggaagatggttatcggcaacccactgaaaggccaatgtcaataatccatctcctgctaaagttgccattcctgctccaaatttacagtgattagttggttttccgcggcgtagatcatcattatccattgctggaaggtcatcgtgaattaatgaatatgtatgaagcaattccaacgcagaagctgcgcgtagcagatcatcattaagcgtgccacccaacatctcaatcgttgtaagcgtcaatgctggacgcagccgcttgcccccagccattagggaataagccattgagctttctaacgttgcttgatcaatatctgtggccaatgacttgcttagataatcttcaatctgttcttttaaaatcggcaatggtgtactcatctttttctgctccgttgcttattgttcatcagtgctaccaaatccacggttaccaccgccattattgcttgggtcatcggtttgtttttcgtagacttgctcatcaccattatcgtcaattaagtgcccaagcgttttttcagcatttgttagcttcgtttgtaattccttagaaagcttgattccttcttgaaactgttgaagggcctcttctagtggcacattcccctgttcaaggtgattaacgatctgttgtaattgtgctaattgttcttcaaatgttggttttgctgttgccatcttagtgctcctttaccttttttatttctgcttgaacttccccgtcatcaaaatgcaggtgaacattttgcccaaccgttaattgactggcatgattaacaactttttcatcactcgttacatatgtataccccgactcataattttaagggggctcagtgaatctaattgtttaataagagttgtcacttgttgtttcttttcattttggttggcaagtgaggctgtcaccaattgtttttgtaattgattaactaactgttcttgttgttgaacccgatgcagtggagaaatagccgttagacgcccacttaatctttctacgttcattcgcagctcttgcattttattttgtgctgcttgacctagctgttgagttaattggtcaaccttttgtgcatagttttcatataatcttgtcggttgctgaaaaatatagctttgcagctgtttattcaattgttggcggtcaaaattaattttagtccgcatcgtatttaataaacgattctgatcatctttaagtgtcattaatacatcgtttaattttaccggcgttgctaattcagcagcagcagttggggttgctgcgcgttgatcagctacgaggtcggcaattgttgtatctgtctcgtgaccaactgatgaaattaccggaattttactattggcaattgcacgggcaactacttcttcattaaaaggccataagtcttccattgatcccccaccacgaccgataataagggtatcaaagtcgccgcggtcattggcacggttaatttgtctagcaatatccgccgctgctttatccccttggacgacagtgggatatagaacaacttgagcaattggataacgtcgtcgaacagtcgtattaatatcccggataaccgccccatcaatactagtaacaactgcaattcgtttcggaaacattggaatctgttttttaggtaaattaaatagaccttcagcgctcaatttcttttttagttgttcaaacgctaagtataaagagcctagaccatctggctccatccgatcaatataaatctgatagcgaccacttttttcatataaacttacatgaccgactacacaaactttcatcccctgttcaggagtaaatttaattttccggaattgatgctcaaacattacagcatcgatcacagcattatcgtcttttaaactaaaatactgatgcttttgccgtaaacgaaaattagaaagctcaccggttaaataaaccgtatgtaggtatggatcccggtcaaacttcattttcaaatacttagttagttcactaactgttaaatactggcttctatccatgatgcctccaccgcgctaaatcaactgtttgttccattaaagttgcaattgtcattggtcctacgccacctggaacaggagtgattgcctgagcttttgtctttaccgcttcaaaatcaacatcccctgtcaatttaccattgcttaaacgattaattcccacatcaattaccactgctcctggttttacatctgtctccttgataaggttaggcacaccagtagcaacaattaaaatatccgctgttttcgttaaagcagaaaggtcgccagtacttcttccagccattgttacagttgcgttagcattatttaaaagagctaaaagaggtttaccaactaaaatactccgaccaacgataactgcatttttcccttgtaaatcaatattatattctgccaacatccgcataattccgcgaggtgtacaggccactggataattaccatgttgattggcaaacagttttcctaagtttaggggattaaggccatcaacatccttagttggcaatatagcattggtaattacttctgaatccaattgaggaggaaggggttgttgaacaagaatggcatcaattgtgtcatcatgattcagcttttcaatttcggcaagaagctcatcttgactaacatcagcaggaaatttttttaaaattgaattgattcctaacctagtagccttattatgcttatttcgggtatagattaagctcgctgcatcatcaccagcaatcacgactgcaattcccggagttatattttgtttttcttttaactgtgccaccagtttttgggtctgggcattgatttttttagcaagggtcttgccatcaataattgtcgtcacagtgattcctcctcgttaaatttccattttatattctaccataataatattgcgcttaagcaaaaaaggagtggaatcagaagtttatcacttcatttttccaccccataattattgttaacagtaatattagttattcgtgttgacttgtttttcaaatttgccaagggctccattgataaatttacgtgacttatcactgctgaatgttttcgtaagttctagtgcttcattaattgctactactgttggaacattttcagcatattgaatttcaaataaagcaagccgtaaaataactaaatccggctttgctaaacgattgatggtccatctgcttgcgagaaggtcattgatttgttcgtcgagctgatcttgatgttctcgcaccccatttactaaagtcagtaaataagggggaatttgcttttcatcatgatgaggaattgcctcatacacagtttgaatatcggcttcaggatctgattgcaaagcaaagagaacttgaaaagcctcctcacgaatcatgtgtcggtttaaactcattttattcaccagcctcgtcattaagatgttcgccaaacaagtcattagggtctacttgttggtcttctttagatgttacgattcccttaatatgaacattaacttcttttacttttaaatcagtcattaatgtgatttgttgtttgaccttatcttgaatcattgccgctactttaggaacagagacaccatattcaacataaacatccacatcaagtgataatttttcatcattgctggaaagctttaccccacgccggcgatcagagcgtcccaaaagttcacttacgctatttgcaaatgaaccatacatctttgaaacaccatcgatttcacttgcggcaatccccgcaataatttctaaaactcgtggcgaaatttgaattgtcccgagtgacttgtcttcactacttaaaacaatctttgattcttcagccatcgtcagccctccaatttatttcttctcttaattatagtaatcatttctattctgcactatgttcgaacaaattgcaacaacttggtcaattaggaacatagcgccagtttagaaattaaccgcaaattatgattataccaatcatgaacgactaaatcgagactagatgtggtaaattgtccgaaattaattgatttaaattcttctaacgttttcaagaattggtctgcctgctgaagcggactagtataccgtgcaaccgtcacatgtcctgagattgttggatatcgttcttttagcaataagtcatgtaacggcagttctttcctaagtacattccgtaaagttgataattctgctgaataatacccttttacaagaagtgctcctgaactagtgatcattcctgctaaacgccaatgaatcggtccaatttgtgaaataatctgccctactacgtttttatatttttcctcttcaaatgttgagagcgaaaagtatgaactagctgcaataaggtcaataatcgtaatatgcaggtcagcaggaggatagaagtattggttaggctcaattgcagccaacttttgcaagcaaaacataatgttccgactaacgtgcgcaggcagtgaagcagtaagcgtcagtcctcgacgcatatctttatcaggatttagcaagttacgatctagctgttcttgatgatttctaattgccgacattccctgttgattaatattattatacagagtagtaagttgcatactattttcctacgattattagatcagttggcgcctttgtcagcacttcaactccaccgtgagtaaccagaatatcatcttctatccggaccccgccgatttcaggaatatagataccaggttcaacagtgataacttcattgttccgcaatttaatattttgagcactgggtccatagctagcaggcaattcatgaaccgataagcctattccatgccccattccatggttgaattcatccccataacctgctatttcaattaattgccgtcccgcaaagtcaagttggtctcctcgttgcccaacatgagcagcttgaattacagcttcacgggcctcattgacgatttgataaacatcacgtaattctggatcaattgaaccaacggcaaatgttctggtcatgtctgccgtatagccattgaagtagtagccaaaatcaacagtaacaatatcgccgtcttcaatcaccttttttgaagccgtcgcatgcggtttggccgcatttttgccactagcgataattgtcggaaaagaggccccgcttgctccatgttctttcatccaaaaatcaagcaagttcgcaacatggcgctcggtcatcccagcgtggacattttctaaaagataccggtatcccgctgaatgcaagtctgcagaagcacgcagggtatttacttcatcactatccttaatcattcgcatccgttcaatttgttggtggaaaggaacaaggtctgtcgccatctgctcatcaagcatatcaaataaggcataagtaactgtatcttcatatcccagaacattcactttcatcccctgacatattttattaagcgaaccgtaatagtcacgggtaatcattcccacaacctcatcgttttcaaattcttctaatgcaagctggtaccggtcatcagtaataataattgcattatcttttgttattaaaaggcatccatcgccttcaataagattaaagccagtgaggtaataaatgtttttttcatccgttactaaaaatgcatcgatatataatttttcaaatttcttctgtagacgtttaattctagacatagtacatttcctttaatactgccggttagagtaatcacgagggccaaagatagccgtcccaacccgcacacaggttgacccttcttctaccgctatttcataatcatgggtcatccccatactaagaacatctaattttaattgatcattttggttgttcatttcatcgcgcaattcacgtaggcggcgaaaaatcggccgcgttttttccggatcatcataataaggagcgcttgtcattaatccccgtaactttacatgtggcaattgaagactggccttagctaattccatgcaatcttgcaaagttggcttaaccccaaatttactctcttcttctccaacattaacttcaattaaaatcgggattattcgattatgctttcttccttctttttcaatcgccttcattagcttaagggaatcaactgattgaatcattgtaacgtaatcagcaatgtatttaaccttattacgctgaaggtggccaatcatataccagttaatgtcggctggtaattcatcatgctttttatctaattcttgaacataattttcaccgaaactgttccatccagctttataaagctctgcaatatctgccgccggatgatttttgctaaccggtaacagttgaacatcttgaggatcgcgaccgctgcgcttacatgcagcaataattttttcttggacatctttagctttatcaacaatcgtcattaaacagtttgctcccttcaattgtgggttaactatattcttacattatagattaacatataattgaaaaatatttaaaaataaaaagactactatttcatgtagaaaagtagtctttttattactattcagcgattgggtaaaccgataccttacgcttactgcgacccatgcgttcaaatttaacaacaccggctaccttagcgtataatgtatcgtctccaccacgacccacgttttcacctgggttgatgtgagtaccacgttgacggtagatgattgatccagcagttacgattgaaccatcagcagccttagtaccaagacgacgaccagctgagttccgaccgttagcagtggaaccacccccttgtggtgggagaagaattgtaaattcataatcatagttgttcacctccagcaatgaactttaatcaaacatttttacttcaatgttttgtggatagctttcttggatatcacataatccatttaaaaaggttttaagaaggatctgactatcatgaccaaggtctaatcctgtaacttccagaaagccaccattatcattatcttgtttaaggtgaggctttgtatgaacaacttgttcaaggccgttcaccgttgaaatagataatgcagaaaccgcggcacaaacaatatcttgcccatatggaccagattcagcatgcccagtcattttaaaagaagtgatccgctgattcgaatctaaattaaactgtgctcgaatcatgatctcacctccgcattaagcgttgatcttgttgatagtaaccttagtgtaaggttgacggtgaccttgcttagtgtgagtgtgcttcttaggcttgtacttaaaggtaacaaccttcttttccttaccttgcttgtcaacagtaccttcaacagaagcaccgtcaactacaggagtaccgatcttagtgtcgtctccaccgacaaagataacttgatcaaaagttaccttgtcaccttccttagcatcaagcttttcaacatagatagaagcaccttcttctaccttgtattgcttaccaccagtaacgataattgcgtacatactttgtgcacctccttaatatctcagactcgccgtactaagcagctaaataagctttagacttaataacgcgcggttgtagttgttggttcacaaatacaacgtttgtataatatcaaatattattctcttcgtcaaccgtaatctctacttttataacgaaaaaaggactgtgacataagttaagttactttcataaaaaggaaatacgcagtacaacaatggaggctgggaaaaaactcctagtccaaaataaaaaccggatgatgaattttttgaacaattcatcatccggtttttatgtacacaggaaatcgttcctgatatgatgtaattacccctaaaaacaaccaaagggagcgatttccatgtatcaaaattataccataggacaaaccgaattcgtactaaactataactatgatttaccacaaaatcatattgcgcggctaattagtgattttgtcgactcgattccacaaaatgtgctattagaagattcaggagcggctaccggccgcccttcatcgcatccagcaattatgcttaagattctcttgtttgcctactcacgtcaaacttattctggaagaaagattgaaatgatgttggataagaacctgccaatgcgttggttagcccatgattatacttatagctaccataccatcaataactttcgacgcagtcagcacgctagtaagctaattaaacatgcctttgtctactttaccatggctttgaaagatcacggactaattcaaaatgatgcagtttttatcgatgggaccaaggtagaagccgatgccaataaatattcatttacttggcggcgggcggttgaaaagtatcacgctaagttaagagaaaagacgagtaagctttatggggaactagtagaaaaacaagtggtgcaagaaatggcacccgagctggttacttctgccgaaggcatggaagtaatgaaacaagagcttgcggagaaaatcattaagttagatgaagagattaagcaagaaccaaaaatcatcaaaggtggttcagttagaaaacggcgccgtcgttttctaaaaaacttcgccatcaattaagcaacgacctaattccgcgtgccaaaaagtatgaacgtaccgaagatatcttccaaggtcgtaatagctatttcaagactgatcatgatgcgacttttatgtgtatgaaggaagatccgatgatgaatcgggagttgaagcccggctataacctgcaaatcgctacacataagcaatttgtccttgattacgggctcttttcaaatccaactgacaccaggaccttagtgccatttcttacccagtttcatgctttagatttctttaagcatatcgttgccgatgccggttatggtagtgagtacaattacacaatgattcttgatcagtttgaaaagcagcctgttattccatacacaacttatcaaaaggaacagaaacataaatttaaaaacgatccaactaaatcacaaaattggcagtataatgccgaagatgattactacatcgatcatttaggagttcgctttagcttttatcgttatagtaggcgaaccgataaatatggtttcgaacgtgatttcaaactctatcgagcggataagcaccaactgtcagaacaattggatgagttggcaaaaacaccaagtggtcggcaacactatatgcaggttaacccaacgtggaattattacaaggctaaagtaaaagcaaccctctcaagtgacgaaggcaagacaatttatcgtcgacagaagttcgacgttgagccagtctttgatcacatgaagagggattttggcatatgccgaactcatctacgcggacaacgagctgtggaaaatgacattgggctagccctggtggcattaaatctaacgaaattgggacaatcaattagtcgattggcgactaatttcataaataatttaaaatccgaactacgatttttggatcgatcaaaaatcatagtccggattttactgttagagaaccaagaattaatagttaattcccagcctcctattgttgcttgcgggggctcaaaaacgaagtcacgagtgacttctgtctcgctccctcttcctacgattagtcaagaaaaatatttagaaaagaagagtatactaaaccaacccggttcttcttcaaaaatcgagaattagtggtatattaaaattgtgaggtggttatgccttcacagggactattgagtccgtataccgatagtggtattttttatggtgcttaatcatggataagagacatttcagagttttattcatacaagctaccatggcgaccttgttcagttttggacgaggtcgtttttcttttaaacgatagtaatagtcaacaatatgattagaattagcgtgttgttggcggatcatattacctacagtaaaatataagagcttacgggcaatcgggtttccacgcttattaatatgatcttgacctaaataggttccagattggtaacgacgaatatcaattccaacaaaggcattaagctgattagcattgtcaaagcgactaatgtcgcccaattctcccattaactgagccgcagtttgtttcccaattcccggaaaagagcagtataggatatactctggtaagcgctgggcaatagattccatccgcttgatgacctcttcctttttacgggttaaggcaattaattggcgagcgtagtagcgaacttcatcaacctgaatggtatcaccagaaacagccggatatgatttttgggcgagatcgattaatcgatcggcatacttataagctttcatcttagatattcgtttatctgtagaggccattagaatattctttaatttaactctcgaataaggcctaactagtgctggatgaggaaaaagctccacgatattcaacgctaatttagatgttctatttacaaataattgcttaagttctggaaaaacttgttcaagtgcagtatgaagatgatttagacgatagttccaatcagcattgagctgattataaaaccgactaagctcatgtaactgaagatagtcttttttccaaggaactgttaatcgaaaagcattttcctggacagtgagcgcaatccgatgagcgtctttctgatcggtcttaactcgtcgtagactctcggactttaaatgaagttctagtggattaagacggcaaaagcggagaccattagtctcacagaaatgtccaattactcgcgaataaattccagtcgcttcaaagtagataattggcttctgagcttttttaatcatatctcgtagagcattaaaccccgctttcgtgtgtactaaagaaaactcctttaaacagtgtttccctcgataccagacacagtagcttttcctcattgaaacatccaaggcaaatatatcagacataaaaagacttcctttttataaatagagctagatataaccgctatcctagatttgtacttcatttcctaaatactcgaactcgtagttccacaacctaaaagcaaaatatcaaatcaaagatagcggagatcattttataatacggactcgaagtccctgggagcatgatcgatcttagctctatcttcagaataacaaaaaagtccaggacaataattatttttgtcctgaactaatcttaggttgtttgtagtagctattaaatcttttctaaagttccttctagttcaccatcaaaaaaactaaccaaagaaatattctcgctactaaactgattcaacatttttgccacgctttgtgtcatataacgtggagtataaatcatgccatcttctagccaccgacttactaagcccagaaatgctgaatcaacaaaggaaatctgcaaattaagtgggaccttcaactgttggttcttattcacttgctcattaaagtgtgtcatttcatttgctaaccgattgtaaagttgttcataaaagaagttattcttttcattatttaatagaacatcaaaaatatcggcgttattttcgatatactgaaacgctttgcggagtgaaaacacctttaccgtccgttctttcgaaaaattactatcgatcattacttggttaaagaaatcgtcaataatctcttggattgctgactgaataaaatcttgtttatccttatagtgaagatagaaagttccccgagtgatgttggcagtttcagtaatcttttggacgctaatatcttcaagcttttcacgtctcatcagatatacaagagctttgcgcagactattacgtgttttaattacacgtgggtctgtcttattagcagccatttaatcatcatccttccatcatacagcttaagtcctttctactttcgtacttctactgttttaaagtatagttgtcatgaaagcggtttgtcaacgaaagtgcagattttatcttaacaaaataattatattagattattaccattgacaactttgtagtgaaaattatatacttaaatctgtttggagcggtagctcaactggatagagcatcggtcttctaaaccgagggttgcgagttcaagtctcgctcgctccatataaacgttatttacaaaaagaggatagagaaacgtttttgtttcctatcctctttttcagttactctcatctaaacttacagataattttctaatttttcactttcattttttaagtatttcttaaatgcactctcatatgttacaattttgttgcaaaaatgaacatttttcataataatgaatatagagattgctttttgaggtgattattatgctaccatttcttattattgttttaattttggttgcgtcggtaattggtgaatttatgtttggcagtcttagtaaccaagaaactggaaaacatagtgcaactaccaatcgcttacgagatcgaaaagcttaatcttatattccgttcaacacaagaggccgaggaaattcctcggcctcttgtgttttatcttaatgttggtcaatcattgcttggtaagcatcggaaatttgatcaggtgttaactgccaatcactaattcccatttttagcaaaagatgccaagcatgccgaaagctttcttgttgatgattaaaataggcatcacttaagaagtgtttaattgctagatacgatttattaaggtctgctaactttgtagatcttcttgcatctgtaattcgttgccaggcttgattatctagcacaaccagatgcgtccacttcatctttgcactatacaacaaaagtaaagctactgattcaacatacgattttagcaaatcttctttgtctactttactaggattaactaccttataccaccctgctgcttcagccatatttgataaagaaatgtcaaggtcaacaaaaatcgtttgctttcttgtttctggcccaatcattaattccttttcatcatcaatctttaattctaaatcgataatttggtgaagcattttagtaatatctaacattgctatgcctccacaataaaatctactgcttattcttcctcattagaagttggatcttctgatggttctgccgaagatacttcatctaaagattcgtcttctgctacttctgtcgttgctggtgattcttcatcaacaatctccatatgatctgttctcacggctagagcggaacggtttgccaaataccactcgcgaaccaggtcgtaatgaagcaatacatcaaagaacgaaacttgctcatccgaatctttaactaagaaggcccactcttgactataatcgtccgggtcaaaagcaatgtcaagtttggtaccttgatctaatagtaactcagccccattatttcgtggtaaattcatcaacatgtaatcttcatcagcagtcgcaacaaataaacgatcaattactgtcagtggaagttcaggcttattcaacataaagcggcgatcatttgcagttgctaaaatgcctagatcaatcgtgaaatcaagatctttttgcaagtatttagcaaaatcaatcagaggtttaaccgcatcccgtaactcaaggtcagtatgctgtttaagcgcataaacgataaaataatttactaatgcgcggttattaaattgcattaatttatcttctaagcttagatagaaaagtggttcatgctgactttgctctgtaaaagccgcttctccccgactatcgacctcaaatttaaaaatagcttcaccgccaatagccgcaacagtcgcttcaaattcatggtttaattcattttctgcaacattaactgctgtatctccatgcatttttaataggtgatccataaaaatcagataatagtcagccgccttatagtgtggcggaaaattaataaacgcgtttgccaaatccattttggttagtttattagcggctgataatagattcttagcatccttagtctgggctaactggtctaaaaggtcaacatatttttgtccaaggcttaaaacatctttaaaggaatcagaaagagcctggacccgttcactaggagaagtcacgattcgattattgctcatcgtcgtccacctgctttccttctgatccatttaaactggctaaataattagcatataaattgcgattagctaattcgaaatcttcaaagctgccaaaagtatcgataatgctcttttgctcataacttaaaatcgtattttcttttgataaggataggacaacgcgttcattatccttaatagtttgggctgcattacgagcttcttcttcttggtcctctaacttttgcagctgctcaaccagttcctggcgactctccttgttacgacttgattcccaaatgccagatcgtgaactaatttcttttaattgttcttgaagggcttctttacgttcctcacgttctcgttgatgatcaatcaaatcttggagacggtcattttcactagagattttactaatccggtcactattgtaacgtttattgtcacgcgctaattcaaaagccgtccgtaatttatcatattctgtttggtcaaaagaaaaacgaacattcaaaacgtctaattcaccaaattgacggcgattccaccagttaccaaaataaatccggtagtgaccagtttgatattcttcataataaaagaagggataggttttacccaaatatttaattaagttttcactaaggtaattacttaattgatcagccaaatcatcgactaggttcattacacctttatcatttggttgttgttcccgatgttcaatctctttagcatagcgttggttatctagtaattggtagatttcccgatcacgatggtttgaaattgcatcattaaagcgtcgcaaatactttatctttgtaataatttgttgattgatgacttgagtaacatcaagtgaatcactattagtttctacactcgccataagcatgctccttgtctaaataactacctattataataaataactttactaccttttttccactctttttaaatttttttcaaaaactttatatttttagcacagatctgttttttgaaggtaaaaataaaagactttccataatgaaaagcctttattcccttatccaattattcaaatatcaatgaacccctaacgataatttagcaaaacggctcatccgatcaatcgtccaagctggttcccagacaaattccacatcaacgttttttacctctggaacctcttttaccgctttagtcaccatatcagccaatacatttgttaatgggcatcccattgtcgttagcgtcatttcaatcaaacatattccatcattatcgagatcaattgtataaacgagtcccaaattaacaatatcgatatgaagttcaggatcaataactgttgctaatcgttgaacaatatcgtccttaattgattgtttgtctctcataattaattatttttccaatacttctcaataaattgttgtcggccaccagcttcttctaaggcaaaacgctgcggatctttcttataaaagccctgatgatagtcttctgcgggatagaatggctgcgcatcctcaattgttgttacaatctttgcatcaccaaaacggccgctttcctgtaaagccttttttgactcttctgcagttttacgttgttcatcatttttaacgaaaattacaggacgataattgtctccccgatcttggaattggccacttgcatcagtcggatcagtttggtgccaataaatctctactaagtctttgtatgaaattttatcggggtcaaaagtaatctttactgcttctgtatggcctgtcgttccagaacatacctgctcataggttgggttggcaacatggccacccgtataacctgattcaactttgtcaattcccggataagtatcaaacggctgaaccatgcaccaaaaacatccgccggcaaatatcgctgtatctaaactcatatatatcaatcctttccttgattcctcaacgtttatagacgttatgttttttgactaaataccgagatttaatgagaaatatcgagaaacctagaatattttttcccatgattttcccatgggaaaatcattcaattcacaaagtttctctaacttattacttaagtataacccaatatatcaatttagattagttatctatagtgtttactaaattggtattcattcatcgccgcatttctttatgatcatttcgaaaaagaggttttagttttacagttttcggatttaaagctttttgttcgttaatatgtttatgataaatttgctcattatcatttggaagaagttctagcatttttgaaaaagccttactttcggtactaggatctgttgctccataatatcgcattaagttaattgtaaattcagcacgatcaagttcattaaaaggtaggactaaataattttctttctcccaaacattataggctgcatttgcagcaattaacgctgtccgcttattaccatcttgaaaaggttgtaattttgctaactttgcaaatacgagccatgcatcctgtttagtttgcgcagaatgcttaaactcatcaataatcttttgtaaatcagctttataaactacttcgggaggaaaataatgatcttttccagctgtatcaattgtaattgcaatattatcatctggattatacattgaatttcttaaatgaccaggaatagccggatcctcttccttactatatacaaaagatttattgatattaataattccatcaactgtaaaaccatctttttttactgctttaattccagctaaagcatctttaaagattggtacatcctcattatcttgttccaaagcattagtatttcctgtatctaaagccttttttgtctgagcaactgtgcttccataaccattcaaactcccaaatgaggcaataaattgagctaaagctgtattatttgccataactatgctcccttctttcactattatctaataatacacgatcactttttagtttttcttactttcttcgctgagcagcaattttataaatgcgttcccaccattctttatcagactgatttttacattcattaatcttttttcttaattcatctagaggaactttaagaagccaatttttgattaatctagttgaatcagaatttaaattcattgtaccaatccctactttattttcctgaaaaaattctaacaatttatatcaacctataagtttcaacataagtaatatttaacacttatattgaaaagtaaaaatatattcagctaaaaattactattctaactatataaacttcataaactcaagtttatgaagtttatattttataattaaaatttaagtttcaaatcttcgactatttatcatctaaatctgtactgatcattgataaatcaatattagatgaatcagataaatcagcgttcatttgtgattcttgactttcctgcttgttagtttctttagtctgaaaactatcttgtttgcttaactctttcggattattaaagaaagactgctctaaagcgctaattatttcaccctgtgaaaaagataaggcgcaaggaaaatcagtaattccgaacataccaatgactaaaaagattaattgattcactgattcgctaggagccgtctgtgcttcaaaccaagcgctaacttcactatagtccggtattctaattgttttagtcttggtttcaaattttccattttggatattgtcgcttttttgtccattttttaaattactattattaaatttcatttgttgatttgctcgtattttagggagtgtagaaggtaaatctacttccccatacaatgcagtaataaatacaatggattggccaatagatgaaccaagcgagttttgaatatccatccattcttttactggtccttcaatgtacaattgtaaattacgtgctttagtaactgctcctctcggcatatgcttcgctcccattcattatatatacatatcattataacaggattttgtaatctatatcattctttaggacccattaatgctttcaaaattaaaactaagcccatcctatttaatacctgagcatatgatccatcgacccaaacaattggaattatttgatctccattgaaactcataaatttattgttaagtttctcataaagccgagtagttttcattggtactgcagccccaccgaacacaaacccaatcttaatacttgttccaatcttccgtagtgtttgagaagcattacttacaatctcatcagcaaaaggctctgctgctgaacttactactttaataactttttctttactgcctggcgcaaatggattttcatcctcattaagatatttttgtaattgacgaatattatcaaatccataattcttagtttgtaagtaatcaaccgaacgttgaaggacattatcgtatcctcgcataatagaattcgaagccatgatatttggctttccattagtaattactgtacagtcacttgttttaccaccaaggtcaaaacctatcgcatctttaatatttttaatgaattgattattaattttatctgctactttaggatacttttctttaagagaattaatgatgctattagccaattcaggataagcatttggcgaatttttaatcgccgcaaaagcaacttctccctccaatcctacaaaaacatttttgaactgcagcgatacactaattggatttttaaagttgtgaaatgtaacaatatgcgtattatccatatatcttttacgatagtttcttaaaacattaggttgttttgcctcactgattggtaatgcagttgtcatatacacgtccatttttaactgattatctaaatcttctccttttttataagcatcctggactcttttgccggctaaattgcttaatgtaagtaacaaagtaaggtcaacttcagattttcctgataagtcattgtaatcaaaatgcgttaacggcattgtactatctaaagctgcttgaccgactaaaaatcgtcctgcttcactaattgaactactagtaatagagacatccatatggtttaagaaatcgtccatataagcatctttttctgcttctgagctaaattcaacgggagcagttacatctaaggaatctttcatagcaattactgaaggacattctatatcttctccagcactaaaaatttgttttgcagtttctgtaccatcactagtaaagagagttcctttcaacgagtcatttcctgcatcatttgcaaaataaagtttataagtcatttgattacctccaaaatatattcgctacatagatgtcatattgaaacttatttgttacttatattcgctaactaaattataaatttcaatatatataacaattaacacttatatattaattctttttgttttaagtgtcaataactagacaaaataacatataagcaaaaagatttgatataactagagtaactttaatttcaattaagtgaagttctgccatcaagggactaatcttatttggagataataaaaaagacgatagttattctaccgccttaatttcacatttatatcatttatagcctataagataaccttgtccaaatttagacaatgttcatttactacattaagcttgccattatcatcaatcctaatgtactagtattaaaagtaatatgcgcaataatattcatttccagattactgaagtgtaaataaataaattgaaaatataagctcaataaaatgtagataatcccaattgaggctccgtgcatttgcgcaaacactgttgcaactataaatgcactaattccaactctcaattttgaattatcaacccaagatgctaaccaagcatcgacacgatggaaaaaactcttccgaaagacaatttcttccaaaataggtgcaattatcactacgtaagctacatagattatatttttttgaagtaattttacaatcaatgatgtatttgaattaccaattatatgattattaaactgtattacaattagtaaaaatataagttcaaccattaatggtaatagccctaagcctagtgcttccacaaaatttttccaggaaagccggcgaattttaggacgcagccataatagataggatattaataataaagtaaagctaccagctagcaaatatgaaccttcaattcccgtaactatgccagcatatagccaaattagcacataaccaaatatgattacccattcattaaattttaggctttgtcctttaagccataaagcatattttcttatttttgctgtcatattcatcaccactcactaattaacaactgttccaattgtcccaatccgttgaatttgaatcaattttctttgattaccatcaaatttcactaagtaaatatcggttgttttagaagaactatgagaacctttacgtgaagaatatgatacttcaacaatcccactaacaatttgcttttgatctataccactcacataagcattgcttccatcataagatgaagtaatttgttctgcatcaattatgctatgaccagttttatcaaggccattattgaacaacttcttatcatttagcactgaactagttgcaattccatgtactctattcttacgtttaatataagtattttgactatcataagtaaaatactcaataaagaactttttagtaattgcttgtaaatcttggctagcttcataagcttgggtattttcagatttagttttgttagaacttactaaattctcattaagaacactctgacgggctattttttgtctttcttttaagacctttttacgttgatttaacatttgcttgacattcgctgtttctttattgtattgaatctgctgtagcttaaatgttcctaaacaaattagactgacaatgattactatcaagcctataactgaggatattttcttacccatattaatcaccgccctcaacgttcataacttgcttagtcactggtttaattttttgataatttaataccttctcattttgtagatcataattcattttaattagataaacggcagattgattatccatagttttaaagctaaccaccgcagtcacaggcacctgattgttaactttaactttcccataaccaatttctacaccattattttctttgaaaagccattccttagtattaggatcgacattatatactttcaattgctcagctaacttagggcctaaatcttcttcaatttgggtcttattagcattccaatcatcatttgagtgtattcctccaacaaccttgcttaatccttcttgcagtttcttagaagctgttatttcagctgaatagtaattaaaagaatcgttaatagataatttgtttgcttcattttgttcaaccttattgatttggttgttagtaatccttaattgatctttgtaataatttaattgcttttgactcggtatgcttagaacagtagcaattacacacagaatcgcaattatccataataaaatattcggactcattttcctcatttctatcacctaattatttattccttctttaataatcttgattggatcaagccaagttccgtcatcagaatatccgctttgaactgatgaagtaattgctttcttggtaatacctaaatgtagatgcgagccacttaaagttccaattttatctccaactttaatttcatcaccttcattaactgtaatatcccctcgactgttaaacgcttcttgataaacttcattgtagccatctgaagatttaacccagacgtaccaccagccaacatcgttagcaaccttaaatactttaccgtcatgcactgctaaaattggttgaccagctcctacaatcgctgaaccaaaatcgtaaccatcatggaagtcatttccaccaccacgaatcattccggtatggccatattgttgaccattttcatatctagttgggccatctttaggaatagtcttaaatggccacccccatttaccactagccgtatcaccaccatcagtattgcacgcattattttgttgatcctgagcaaccccagtatctgcagtagcggcagcaccatttaagagactatcatttgagctaatgtttgaaccaccaaactcctgataagcccattgtgctcccggatcacgttgttggccgtattgattttcattaccagccataccctcataatcaataaaccaattccatgttgcttgatgaacatctgtcgctttccctaccgatgtttttactttggtataaccatggtttagctcgtattgcattagtttaatttcattgtcaagagtcagttcacttgggtctacgctcttaataattccaccagcaattaggcgttgattttgactccactgaaataagccattataaccaactccatttggcttccaaacatcaagtcccgattcacctattgcattaccgaccgctcctgctgcgccagcaccactaaagcccatctttttagttaaggtttcaaaaatagtctttgctgccttatactcagctgaatttttatccttccaatttccattactaataccgccagccgaaattgttgcggtatcaatactactatcacagccttcgtcgctacctactagcatcgcaataattaaggaaactgcaaataataataaagtaataactcctacaatcgaaataataatgctccaaagatgaattctagtcttccttttcaaatagaatcacctcttttataacaatggcagtaatttttcaattaaaatcagtccaacaataactgccaaaataactaataaaaattgtaattttggtacctgataattaggtacgtcgtcatcttcaattagtctttgcgcctgttgatgaacaactttattagtattttctttaaacgactttacttgatgaattgatcgtcttaataagtgttcttttgagggcttagtattctccttgtctttgttatgatgaattgccattagataccacccccataccgatccccttcttctttagtgatttgaactttaaattgaacattacgatccccgttgatattcataaggcattctgtttttttaagtttagttaatccttgtagttcatcgattgtgactgatccaccaagtgctgtctttagtcgtggcaaatcatcatctgaaatttggaaaaagaagcgaatttgaaataaagaaaacattttttgtacggcaatgatatatggatcatgcgaatttccatttataatcaaatctttaattgttggtgccgccatcgtaatagcacaaaagtttttgcgcatttgttccatcatcattgtgagaaattcaaccccataggcgaacttaggattaacaatattttcgacttcgtctagatttaagtaataccaaggaataaagtcaggatctaatcgaccttcttttaataatcgccgtagatgcataccgttttttacaatatctgcagataataacgttaaaattgagtaaatttgagcattaaatactgcttgtccttgcgctaataacccttgaatgttgaaggtcactacttgttctcgcgaaatatcagggaaacgtgtaataccgtcaaacatatcccctttctgttcctcaattgaactaaaagtattggtaatgcgactcattgattgtgacattaagctagttatatgaatctttgggtcccgttctgctttacgcttgcgttcagcagcatagattacaaaatcctgtaaagttgggtacatatcatgaggaaggccggtaattttgatattcggcatggtcttacgaggattagctacccataagttctgatcaatgtaaaagtctcctaaccactgagacaaaattgtcatatcatcaccagttgcgtcatcacaaagaaacttaaaaaagttagtaagttttgtaatgtgttgagccatcgagttaatctcatcaaccgtcccatcatcattaactactgtaggaaagacctcaaatggattaattaagttttctggtttatcaagacgaataataattcctccttgatctttagtttgatcagtatattcagacgaaacatcaaaattccgaataatcgctcctctcgagaaaacatcatcattcattttcttgagcaatgtagatttacccataccagcattaccagttacaaagaaaaatgaccgagttcggcgattatcccgttggaatggatcgaacataacttccccatttgttcgcgtatagccatagtaagagccattggggtcctccaatttcacgtgattaaatgggaagaaaccagataaattttcagcatcaataggagtcccaattggtttattccccatctcttcttcagacattgtaggaacaaagatggattcaaaatcatcaagctgctcatcagcatacctagccatatggaacattccgttctgacgaattacatcgtgaacacgcttatctaattctgctaaagttggcgcatagacaaaaattcgaaagtagattcgcttcataacttcgctttgctgagtaatcttttgcattaaccgcatttgatcattgtaattacctgcagattgaacattatctagagccttagctttcgatgaaattcgtgttgcttcttcagttgcagctttagaaatttgcttaacaatctgatcacgattttcagtccctaccgaaataacggctaaagtcgatggaccgtttgtgagattaacgccccagaacggggacattcctttagagggatatttataaattctcaagcacgttaggaagccgtctccaaattctaaataacgagcatgacgtttaagattcccctgtggttgtactcgtgctaagaagtctagatcataaccaacactttcataatgcaaaatatcttttttcttcatacctataaatacctctatcgttgcgtattaagattattaattcgtgtcaaaacttcttctttcctttttttgcttagcggttcaagaaataaagcacttcctccccaattcattgctgcattccgattattccttaaaatggtcttagtttttccaaataataataggaagaaatcttctgaaattagttgattttctaccaacatatttcttcgctgagtttgatgaatgtattttaattgcgtcatcaattgatgtttccttctaggatcggtttcttgactaatcgcaatattggtccgattgtatcgttttccccaataaatcttttgctccgtagtatcaactggaaaaggacaaatgataaatttcatatcacttaatgctgcttgtagaaaatgatagaagtcatctagcacgatattagcttctcgttgtgccatcgtacccacgcccagtcctcgaatatttagtaaatcagcatagccatcttccttttcttttaaggcaagaaagtgttcaggatcatcagtaatagctttatacgccaacaaattcatcatgggcgtataagctaatttttcactacggtaatgttctaacggatcttttccgttttctttctgtttacgactaaataaaccgctatgaattttcttttgctttgtaattgtattaattgccattactctgtcgctcctttcttatttcactaaagggcttaaattcgtagtaaccatatgatttgaaaagcttactttgccgatgagtaatcaacatccaaataacttcaaagtttcttttccctgggttagttcgaggatgtaaatccaaataaaaggctagaatcaccgaaagtactagaaagattactgactctaccccttgatctgccgggaataattggtcaagaaaaatacttggccctatcactaaggccaagcatgctatatcggtaagataaagccaccccaacttgactccttctcgtattccggctactacaccataagttttcatatgttccacctcgtttcttattgatagtaattaatcaggttttacgaacaagtttcgccaaaaaaagccttctcatttccgtattaagaaacaaaaagacttttcgttgattttatttaattgttactcatcatcaaagggatcactttcacgaccatggatatgaccactttgacttaaattaaactgccgatttttgagataactagcactacgttgttctaccccttttgaaagatgagtaacgtgttgtccaaatctttctacttttcctggtcgtgtgactgctggcggtggagtaggcgacgagtgtgtggttgtcggtgcgatattagtgtgagcagtattatcatagtaatcactatgtacgcttccttcatcatagttattctgtgggttaatatttgtacctggtgtattacggttaaaggtatcgttttgacttgagtttgtcccatagtgactgctaaattggtcattgcttacattaggattattaacttgcttgctaaaatcattattagcaatattagggtcattcggatccattgtaggtgattgattcatttggtccgcccattggctgttttgtgcatcattgatgccaacagtatttgagctaacttcatttgcattattcatttgatctgcctgctgttggaaattaccgtccgctggttcattccctaatagactatcccagttgcttaaatcctgaagaccgttattagcttcttgtgaaggtgttgatgggtcaatattagcagcagaatcagcattattaatctgatcagcttgatctgcaaaacttgcgttagcaccagttgtatctggatcatcaaagttaattccggctggttgttgatcttgatcgtcaactgcctgaccattatcaactaatccttcatttgctggattatctactgtatctggggctgcagttgagttggtattgtagctgctactgcttccttgactattgccctcataattatccgatgattgactgtttccatatgaactattgttagcttgtccatagctagatgattgaccctgactagtatttgaactattaccttggttatttgtttgaccattgctagttgaagtattagtaccgtaaccgttactttgagattgtccagtagcagtgttggtactatcaggctgtccggttgaattactgttactctgtgcagagttactactttgattttctgacaaaccagtagcggtattttgtgattgagcatcactagtactgagtcccgtattattagatgcactattattagtactattagcaaagcttcccatttgtgatgaatcagtgttgttagtatcagataaaccagtagctttatcagttccatgagattgagaactattgttggtaattccgtgagcattgctcttatttaacataccaccaagcatcgagacacttttacctgcgccacgcattgcaaatccaccaacagcaccggccattgcaccagttgccattaattgcccggcttcttcactaagtccctgagatactccggtaactcgttcaaaataagaaatcccagcaaaagaagcataaccaccagctgcatagataatcgcaatcgctagactacgctcgatccagctcaaattatctggcagcttacttggagctacattaataaagataaaataaactttaataatcaaaaccaatagtactaatgacaggaaccatccaaccactgaactaagaaaatctcgccatttttttgaactccgaacactctgtgctgcaataaacggtgctgccaaattcattaaagaaagttcaaaaatatctttagctaccctaaatgaagctacgatgagcacaattcctaaaataagagactgaccaattaagccaagccagttaacagaatatcgcgaatagtagctgttcatccatttagcaaatttatggtaatcattcttttcaatcgaatagccaccatcggtttgttcatgttcatcaactaaatggtaattcataacggtctcagcatctttatgctttttatccaatcctaatcctttcatagttggttcatccataaagtcaccaaggtccatgttctcaatatcatcatcattatctaaaacgttccagttggcaacgtttttaattttgctagaatctggcttgtactgataattcccccaatctttccgaattaacgtgcttaaatcaattacattatttttgattggttgcacagctaaatcttcactcatacctttattactagcacgattaatatctgaacgcgcgctaatagcaatatctccgaatccagggattgtactactgccaccagctacacgcatcatcattggtaagatagtcaacgtaattgaaaccatgacaatatttggcaaaattttgctccactttgaagcatgtcccattgtttgcatggctactaaaatgattgccaagactaataatgaccatccaattgccgaaacgacaacatacagaccatgcaacggagatctggggcttgataaggttccatcccagcctaataagccaaacatagcatcaaatatcttttcaaaactctcattgatatgaaaaatagtttgaactatcacattttgaaagaaaccagcaacagcatgcaaagtcccccaggataaatgaagataatttcgccaatcttcataaaagcgaattattttcccagtatcaccatctggaatactagaatacggtccaccactaaccgcttgatctaaactacttgaattgatcgctagtaatgataagcataaattcttaatcaatatccacatctattacgcccccttcttaaattgattaataaagtcaatagcattttcatataaagctgaatttccttgaaatagatcttctagttcagtgtaactattatgatttttccaataattataagtgtcctgaaataaccccattgcaacctcttttggttggacactatggactaggctataaatgttgctgctaagacttcttaagcgttcatgatcatttagttccgtatcagtaaaaattaggtcatttgaatctgcatgcgagattacatcatcattaacctcagtaggaatactatcgttaaactgagcttcaaagtctttcataaaactgccgctaactgattcctgtggattaccgcttaaatctaaaatttgtttataggcgagatcataattaattcgcttctcttttaaatctaatcgtcgatgcaaagaaacaattctgatatctgacaaggtagtttgatcgttgaattctttctgtaagaaggtatttcgatatggcatcttagtctttccatgatcaaaaatcggtttggctgaaattgaattaccacgttgatctattcgataaactgatcgtaacactaccatttcaccacccatgaattgcattaattcaggaaccgataaaatatcttgactaattaactgactattaacactagcactgtgccagtttccaacttggccattaatattttcaacagagactgtccgcttcccaattcgtttagaaatactttcagcagttgtcgttgaattggtcaaaatatataaaatattagaacagttgctttcaatggttttagcttcctgttcgttataatgaatttgtaactgttctagattttgtacgacaatatcaaacatcatattaaaacctaaacaaatcgaaattttcttagtcatatcccgaatggtcggcaattcagcaaactcatctaaaataaaatggacgcgacgaaatagctttcgcccattgctttcagccattccatataaaatattgaaggcttggtcaattgcaaacgccggtaattgattatatgttgagttattaggcggcgtgaccaagaataaagcaacaggtgcttctgaatatttaagccttgtctctgattctataagttccccagaaagttgattgcttgtcactttaagtgaaacatccttaagaatcggcttcttagtataagggtctaatttaaactttctccctaatccttgtttagcataatttttgtgaccttgaagtacaacttcttggtcaagcacatctgctgaattttttcgataattgaaactgattttaagtagaaaatcatctggcaaagtagtcttaattgcatattgaagattcccgaccttatcaattagctgtgtacgcttttccaacttatttccatgaagatcatcaaattcaacaactgcagtcttaaactgatatttcggatcagaaaattttactttaagcgttctagggaaaccaagcttagtaaaatcaagcgaattcaaagaagtcattttagcaatatcggattgctgatagattttgattccttccattgcactggagtaaatattcccagaagtttcatcaccggcaaatttactttgagcaaacgcatctaaagccatttgcctaaatttgctatagttcttttcgttgagcttttgcaatttagcaaaataaactaataatttattcttttgcgattttggctcattgtcttctggcatttctaaaagtccactatctacttcatcatcagtaggaataatatctccagatgaatttagtaaaacttctttagaacctaattctgtcatcatatgaaggacattatccatcgtgacttcagcccagttattattgcgtttagcatgatcaacaactgccaaaattaaagcatttagtaaattaatcgatgaattttgccaaaatttatctttggcattcggatctacataaatacttgaagaaaggctatttaccgcttgctgggtctcgtcatagtagccgtctttagcataatcaataatctgttgtaatgggttataactcattgaaaaatcaggattctgaatgttaagaacttcaacctcatagcctcgtttacgtaaggtctcataagacatttgataaagttcccctttggagtcattaaccaccattgaagactttttttgtgcgcgtgacaaaatatcgatcaatggcataacttccgtttcccctttaccagaacgagagataccaattaatagactattaatagttgtttgatcaattgagtaaaaacctttagctggttcaacaaatttcactttcccttttaagccaggaaaagcagataataattgtaaaagcttaggacacagataataacttgtgtaaagccctggatggtacttaataaattcagagtttggtgtaatatgtgcaactgggattccaccatagcctgggaaagaagcgccccgatctgcaatctgtggatattgccgaagtatttccttttctgtcgctaaacgatcgtttccatattgtgaatgtttagttggcttccagcgaattctcatcttaataatcatcggaaccaggatcaaactgaagaaaagttcaattccccagaaaaagccaggtgcttgatgcattactcgatagtttcctaaattactaaactcccagccggccaccactgaacgaaaagagtcttgagggataattccattgagaatctgtgctaaaaactgtccggaggctggcgaagttacccaataatacgaagcactaattccactggctaaccagcaaaccacatagctcactacaatagagtaaataagccatattccaattagaaatatcggtgatcctaaaactttctgatcctgtccgtctttacgatgacgttcacgatcataattttttgccatgacctaacttcctttcatttaaattccatcacagcataaaaaagttacagaaatgtttaagtttcgccaaaaaaagccaaccattttaccggttgactcacgttttacttctttcttgtttttaggccaacataagctccaattgcacctgctagaattaccaccccagtaacagtcaagtaaaatgctagtgaagcctctgtactaccatttggattcatatttggagcagtactaagattattagctttattttcggaactcacagcactgctactagcattagaactactatcagttttatcacttgtagttgcagtcgaattactgctagatgcagcagcaatcatattagatgtatcactagcattattcttggccatatcttgaagctcttctaatgtaattccttcaatagttgcaatcgtttctcctttagaattaagtaatgtaatttttagcggatctgtcatcaatgttttgttacttagcgcagttgagctaagattaactttaaaactgatattgtcattttttcgttgtattttcccagaatcaacagtttgatgttcctgggagccatcgctatcagcatcaatatcagttgctacaaaattaagcttttgatcatttccctttaccttatttgccggtaactcaatcttaattatctgtgaaccatcgtcattgttagttaccgtagcattaagattggtgtccttagtcttataagtatctggtgaagtaatttgaactgtattattaatatcttctgcgtgaacagcaattggagtagctgaaattcctaggcctaagatacttgtggcaagaagtgtattgagccataaacgtttaccaacagaattttgagtgatcttcttttccataccaaaaaccttcctgttattttattcaaaagtttactttgaaaaatgccggtataatcgcctcctttatccgacaccctaattaaaaaggactaatttatttctttaactttcgccaaaagaaaaagccagcacataggctgaccttagtgaaatagatttatttattggcttgagcaaccttatcagctagttgattattattagctttcattaataagctctgtgcctggctagcacggtagcgatcattcatattcaagttgttcattttttgaataacatcgtttgcctgtttcggatcattagcaatgatagccttgtccaagttatagtaagtctcagtcttgtacttatctaactcattggcattgttgctatgtaatgcagcaactgctttagaattaatttgatcttgtgatactgtacttaatctttttgccgctgcaacccgatcatgcatttgttgttgaagctgtgcaacttcttgttgatgttggtggttttgatataccgtatatccagcaacgccaactacaattaataatagggccactacaaatcctattaccatccgttttacgcccttaaccatactagcaacttgattatctactttttcttctgattcagctgttgtttgtgctgaaggactagtttgcggggtctgaatcgtcactgattgtggttggttcattttttgtaaactttgtgccaaaactaactgcataatatcattaacgtttttactattttctttgttactctgttctattcgtttattagtattttcctgttttaaaaggtcaatttcttttcgcaacgattcaatcttattatcacgagactgtaactcatgttttaagttaataacgtctttattattagcatttcttgcagcttccgaagtacttaaacgggcagtcaaatctgagattgtcttatctttttgttccagtttttcatgcggatattcgactcgactcaactcagcctgtgaacgattatgagcaataattgtttgccgtgcattcatatcttcattggtaacgttagttcgagtactatcaagttccttactgcatttctttagcaattcttgtaatacttctgtcgcgtgagcctgaacttgactagcatcttcttgagcttgaatctcataatggcgatttaattccgcttctaacttcttttcattttcgttaacttgtttttcgtgatctttccaagctcgatcatagcgatctagggccttgccattatattccttatctaattcttgttgggccatctttttctgtgttctagctgattcgtcaatttgttctaaagtcttttcataacttcttttagcctcagctttatcgacatttgcttgattatcaatttctttatttttctttgtaagggcttggttataatcattctgaatacttttttctacttcatcatgaatggttgctgcgtcattagcatgaagtttattgtattcagctaatttttcttgaatattttgtgcatagatatttctgcgacctagtagatatttttcatttgagctattgagtttattagctgcttgctctagcaccttgtttaaggtttttttcttttgatttacttgatattcaacatagcccttatgacctggttctaccggatctagaacttcaacagcaaactttggtgcttcaacgtaccctttattgcgaacgtcttcaatcgttttagtgactttttcttcaacgctatgtttctctttccgagaattatacgtatccatcttctttgcgcttggcttatcgttatgattttgaattacttgttcttttggattagacttctttatcataacggtctgtgaagtgttctccggataactattagattggtcaccttgattagagttagttgtttgtgaaaccttttgattattattcataggcactgcttcagaaaattttcctgagactggatcatatacaggcgctttacttgcactatcattttctgttttttcaatattctcaagcgctggaattgaaagagttactctacctttttgtgtatcttcttcagttggcaaaatagcaatgttatcgtcagtagttcctgtggaatcttgataagctgttttcaattcctcacaataatttatcttctcatcataatcgacatctgaattagagggatcattaaaaatttcttcaaagatactcttagtcaagttctggtagtcataatcaatactaaaattacttaaagtaataaattcatgaggattcccatccactgatccttttttccctatttttgctttttgtgttttatcaaattcccaaatggcaaaatatgaaaacgtaacaggcttagctgttgttgcagcaagagtccgtaattcatcaaataaatcttcagctgttttaaaggtagcgaatggtaaagtttgatttaatggagcgacattttcattttcttcactctcggatacctgctcaataatttttcgaatttcatcattattttctggtgcaaactcatcatcaaattctaagcgaacggtgtatggatcatccagcataaattgatttttcttttttaatttcccgaaatgtcaatttaagttagaaagaaagtagttgctcatcagtgacgtaggacatgaatacctcatatggagttcgatagcctagtgatttgcggggcaggttatttcgcttactcatcagttgggtcaccaattcatcaggaagattgcggaaatctagctgttttgttaagccgtcccggcgtaaaagaccgttgttgttttcgttcagccctcgttgattgggagcaccaacctcggcaaagtaagtgtgaaggtcaaattgattggcaatctcgcgccagccggcgaattcttttccgttgtcaaaggtaatcgatttgaagaagtgctgcgggaatttccgaagccactgacctaagtgttggttaatcgcatcagccgtcttttcgtgcacattgagtacaatttcgaccttcgattggcgttcggtcagggtcattaccgccccttggtgctttttgccttggacggtatcagcttcaaggtgtccaaattcagtggcatagtgcggaaagtccttggcacgctcgtgaatacttcgccccaattggccagccttcccgcggcgctcaatatagccattcgggtgccgcttacctcgcatgggcaaagcacggacatccaaaccgaactgcccccgttcaaacatccggtaaagagttcgccggttacaactaattgggcgctcagcgcgcccaataatggtgtcaggcgtccacccctgggcaattttgtcgttgatataagtaagttcagccagtgacaactgagtacgttttcggccacaacgttgcttattgcgcatatagtgatcttgataatcagcaattgaggcaccggtttccaggtaacgataaacgcgataaacggtttcggcgctacggttgatcatttgggccactcggtacgctttaagcttttgcacgaaagaatgggcgatgattgtcagctcgtttgtggtaagatgggtgtaagtcatttgtggtttcctttcttttgtttaggggtattcaaaagtctaccacaaatggcttttctatttttctaacttaattttacaaacggcgtttcttaaaaaatcccattatttttactccttcatcgaattaatttacattcttaaatttatctgctatttttcattacacaactttcgccaaaataaaaaaagacgccatgaatttcttcatgacgcaaagcataatggcaagcgattaagcaccaaatgattgactagtataattcttcaaaaattcaacaataacaaaggcaatcaaccctacaactagtccaacagcagccttttgccacttctttttaccagaccgtgcactttcttccccacctgatgtgtagagaattgctccccaaacaacgataaatacagcatatgctgcaagaatgaccattaggccccgtgacaatttattaagtaaacttgaggtaccaccaattggatcagcaccaagagttaactcattcattgctttggcatatgcggttgggaaattagtcattaaaaacttatccatcaaaccgaataacctccttaaaattaagatgtcatcaatgattgttgatgatcagtcatcagtttaaggaggtttttaatttatttaactttcgccaaaacttactttttctggtcagattcaataattttatcttgattattttgatctaaaaaatttgtagttggaattctttctttagcaacttggaagaattcatctagttttttaacactatctaattgccaatatttcataagtttagttgcaaattcgtttagttgcttatccgtctcttctttttgtaaatcacgcagttcacttttttccttagctaatttctttgctagttctttgatgtaattttgctttttagctgttttttcagtttctaacgttaattctttctttcgagccattaaaaattcgtctccaatttctgttatttactatctggaatcaatccaaaattgattttgcgaccgtttttattatgatgttgcaatttactacgttcaaattggtcacgaggatcataaaccttagcactaattttgtggtaggtattatcagatttattttctaattgcaaaataatcattgaaagtggcgctgttacttcattttcaattgttctttcaagcggtcttgcaccatttttaacatccgttccaatatcagctaggtactcaattaggtcattgccataagcaaattgaaagccatgttctttcaagcggtcatttaatatttgtaagtcattttgagcaatttgcttaataactggccggggaagcatattaaatacaattttatgttcaatccgatttacaaattccggacgaaaaatattagttagttccatattgactaacttcttaaatgcagtatgcctccgaatccgttgacgttcactctggtcaatttcgttcccttcaatcgttttctcacttgattggcggtcattgattagttcagctgcaatattggttgtcataatgataatgacatttctaaaatcagttgatcttccaaaccgatcccgtaattcaccagcatccaggatttgtaataggcgatcatgaactgctgaacatgctttttcaatttcatctagcaataaaatacaataaggtctgtgttttatttgatccgttaatagaatttgaaaatgatttagggaatcgcgctcactaaattcagacatatcaaacctcactaaggcgttttcgctatcaaacataaccttagctaattgcttagaaagtgctgtctttccagttccagtcgttcccaagaataaaaaggacgctaatggccgattaggtgcttgcaaccctgctttggcaattgtaatcacattagctactgattgaattgcttcctcctgtcctttaactaccttactaagtttatctttgatattacgtaaacgacttgtatcattacgcaaaacattagtaatgggaattcctttcatttcctgcagtactaatgctacttgtttaatatccacatcaaccacatgattagtagcagcaattgcgccagcttgatcaatcaagtcaattgccttatctggtaaatagcgatctgcaatataacgaactgataaatcaaccgccccagcgatcgcagaatcatcataatgaacgtgatgataatcttcatagtttttcttaattccattaagaatcttgattgatgtattccgagaaggttcttctacttttacttgttgaaaccgcctttgtaatgctggatcacgctcaatgaactttttatattcatcaattgttgttgagccaattaattgaatatctccgcgagccattgctggttttaacacatctcctaagtccatggctcctcccgtttgatcagcacccataattgtatgaatttcatcaataaaaaggatattttccccattagtttgtttaaattcattaatgatattcaacattttcattactgtatcttgttgtcccagcgctgcaatctgaagaactcgaatatgttttccttccagttgtttaccagctttatgtaaagcaattaatcgagctaatccttcaataatagctgtcttccctacaccggcttcaccaatcaagattgggttattcttagtctttcgattaagattaataatgacttgcttaatttcctggtttcgagcaacagctttatactcatctggattcttagctgccgctacggttaaatcatccgtatatctatcaatattaggtgtcttttttaattcttcagtcaattactaacaccccttactatggctgacttaataacacagcttctaacaggctatcagtcttctttagaattttttcatggttctctattccatatagatacgctttaattttgccgtgattcttctcaaaagttacaatgatctgtttagtaataaatggattatcaattaaccattcttcttgattaatttgattactaacaaaccaaaatgaactatcaagacccgccttttttaattcgctatcaagttcgtaaaatcgcaagcggcttagattactctttggccatagctgcttgctccagcctattggcgttcttattttagtatctaaaacattcaataacgcttcttcactccagcgaaatgcattgactcgtgagtactgattaattcgctctgcagtttccgctaaatattctttttctaactccatcacaattccttttccttcttagtattacaaactaaggccttcatcatcatctcggccgccaaaataatcattaatatctatatcatctgctggttgatcagtatcatcatggcctttagcctgttcagcctgctgataagactcatcaatttgcgagctgtcgcctaaatcaaccgtctcctcttctggagccgttttggttgctgtaggtttttttaactggaaatcacctttatcaggagtagttatatcgtagttattgatattaattgttgaatcaagatcctcgtcactttctggctcatactgcgaaacaagatcattcatgctagtttccgtttcattatcatctttttttacgtttcttaatttaattggtggctctgactctgattcttgctggtcattattattgcttgacgaattttccgagctggtttgagccggttgcgttgtcttaccaacttctaatactcgtaatttttcttgtagtttatcctgtaattttttagctgactctattttctcatgcaattttcgattttctgatttgagcttttcaataggttcgaaatagtcaccttttgatagataaagcatactattaatttcttttgcatctttcagcttaaagattatacaattcagttctttgataatgacctcgtctaaagttaatgcccaagtcgaatttaattgcgctgaatgcgcaaagaacttttcatattgattgtcactaactaatatctttaattgagatccactattactttcacattcaaaatctaatagcacatcattacctcaatttcttgagactttagtattcctgtaattttcatcatttttatttacctcgctttttaaaatccggtataaagccaataaattcccgtcccttatattcacttggccaagttgaccactcaaattacctttct

SEQ ID NO: 52 - DNA, 42311 bp, synthetic construct
  misc_feature 1..42311: note = Based on Lactobacillus reuteri
  source 1..42311: mol_type = other DNA
tgacggctttgtcggtgcctttcttagaaactctccagttcgaatatgcatttcctgtaataggctggtttgagccactcgaggaagaactgttaattgttctaggattgtatttaaactagcttgcagttcaccattcattcgggcttcaattaaaccaatcatggctttagccccctgcttagtccatgacttgccctgtttcttcatccggtaagtaaaagcccggtgagaactttcgactgaaccaattaaatgaatatccttaaatccgcgcatttgtggtgagaggatataccgccaatttcgctgtagatactttcttaaacgcattaggtcgtctgcttgtttttccgttaggttttgtgattcataagtatctaaaatattgttagctctgattgatcatgatgacgaacggctttaattgctcgcatggctaattcgttgtgccggcctaaagtatgttcaattttctgtaaacaatgatagcggtcgagaaagtattcaccatgtgcaccttgaggaactaggcttaatagcttagctggttcgtaacctgggccagcgtcactggccaaaaagatcgtttgaccggcaagcttataatggcggtctaaataatcacttagtcgtgcttcaagccgtccttggtgcccaacactgagaaagtcatgccgattaatgatttgattagctactcgctcataaacccgataatggtgcacaagagtcagctgacctgcttcttttttacctttaatcataaaggcatcaccctcaatagttaaatttttaggcatatggcgaggagtagcttggtgtttcttttgcttgagtttgtttagctacctgatttcctaactcatgcacggcgtgcattaccgaatcggcagtaattccgctgtcaaatacaaggttcaaaatgtcggcagtattgcgcattgtagttgtttgggcaatcttagacatcatcattaagtagtgtggcgataaacgacgacgtggtttaatttttaattgttggtctaagtaaaattcacgtttctttgtcccagcctgataataccgtcgttgaaaagtcaccgggccaaagataaaattaagcgtccgtggctgtttattgattacttgatagttcgctggagcttgggactttaagcttcgatctaagctttccaaaaagttttgcatgattacttgtcctaactccaataccccttttaaaataatctgttcagcttcaaataaactgcctgatttcaccaaattctgctcgatttctgttaaaatatccatgaggaaagacctgcctttgcttagtattcgacacactaaaggctactggtcttttctttttttgtaaataagtaaattggtctacaaaaaagatttccacgaccagatgaattattcatccaacctatgaaaatcttacactaacgaatattttaatttcaagttaagaagtatataatattgctgtataaaataggaagggagaaagaaaatatgcaacaattatcactgttaatcgttatgttagcggcgttaattattcctattattatggcgcggtttaaggtttcctcaattccgaccgccattgctgagattatcacggggattattctgggaaaaagtttcttaaatatcgttaaccccaactggaccctcaatatgatgtcgtcgatgggggttattatgttaatgtttttgtccgggatggagatcaattttgacctgttccgcaaaacgcccgggaaaaagcgtgatagtaagtcgccggtaattatggcttcacaggcatttggcctcattgttatttcttcatttgtgattgccttaattattagccgtttgcacttatttagcgatattttgttagcaacaattatttttttcaaccgtcgccctcggagttgttatcgcaacgttaaaagaaaaggatattttacaaaagccagtggggcagaccctcttattgacggcggtattaggggaagtggtcccgatgcttgcattgaccttctatgcatccattaatgggggcaatgccaaacgcttgggcttaattgtcttcctcttcttggcagcttttttcctcttgcgacggtttaagcaaccgtttatttggtttaataaaatttccaaatcaaccactcaacttgatattcggttagctttcttcttgatctttgccttagtaacaatcgccgaaacggtgggagcagaaaatatcctgggagccttcctagccgggatggtcatgaaactgcttgagcctagtgaagcaactgaagaccggttaaactcaattggttatggtttcctgattccgttcttctttatcatgacgggaccgccttgacttgaagaatttatttgctaaccaccaagcgctagccctgattccgattttggtcatcggctttttacttgctaaattgccaaccatgttcatttatcgacgcgttttaagccccgcaattcatttgcaggcagctttttagtagcgacaacgattaccttggtattaccaaccttgcaagttgcgcggaatttgcatgcaattactggtgcgcaatcggatgcctttacattggccgccgtgattatctgtatcattgcgccaatcgtcttcaattcaatgtataagcttgaaaagtctgatttgatcaagcaaaaggttaattttatcggaaccaacaccttaactgttccaatttccaacaattatataagaactgtatgacgtgcggatggtgacggacaatgaaaataacttcaagacctataatagtcaggtgaagcatttagagtatctcccgactcttgacgcggaggccctggagcagggaggctactttgattgtgatattgttgtcgttgggttcttaaatgatcataagtcagcgcgtctagctcagattgccaaagaacatggggtaaagcgggttattgccagccaaaataatccgcggttggacccgaaagatgtcagtgctcttcgggaaaaagggattgagatctttaatagtttcaatgttcaaagcagtgtcctgcgtgccttaattgaatcaccattgatcttgcggatgctgaccgatactgaagctggcctatacgaagcaaccgtccttaattcacgttatactggacgtgaactgcatacattgccatttgttaatgatattacgattagtcggattttccggaagcgcaagccaatcgatccgcatggtgatacgattatcgagtatggtgatcatatcctctttactggggaccggaaagcagccgaagaggttcgtgaagccttgcgcggcgttaattaaaatatttttcgttaatgtaattgccgtaaaagcgctattatggtaagattttaaatgaatttagaaggaggcacggattatgccattagttcatattgacttgattgaaggccggaccgatgagcagttaaaggctctcgtaaaggatgttacagcagcaatttcaaaggatgccaacgttcctgccgaacgggtgcatatcgtgttgaatgagatgcgcaaagaccgctatagtgtagctggtaagatggtcagcgacaagtaacaacaagagagtcatcgggggaggcagttcagtctttgcacggtggcttttttgtatgatctaaaatccatcaagtttcttcccattatataggtagaaactgctcgcaattagcagcgaaaggatgaatataattgagtgaacaacaatatatcatggcgattgaccagggaacgacgagctcacgggcgattatctttgaccatgacggaaataaggttgcgatcagccaacaagaatttcctcaatacttcccgcagccagggtgggttgaacatgatcccctggagatttgggatagcgttcagtcggtgatttcaaacgtaatgattaagtcccagatcaagccctataagattgcggcgattgggattactaaccaacgggaaacgacggttatttgggatcgccataccggtaagccgatttataacgcaattgtctggcaatcaaagcaaacgagcgatattgccgaacgattgattaaagatggttataaggatatgatccacaagaagactggcttagtgattgattcatattttgcggccaccaagatcaagtggatccttgaccatgtccctggtgcccgagaaaaagcggcgaagggtgacttaatgttcgggaccatcgatacttggctactatggaaattatcaggacggcgggtccacgcaacggatgtgactaacgctagccggacgatgctttttaatatccataccctcgagtgggatcaagatatccttgacttgcttgagattccgcagtcgcttctgccagaagtaaagccaagttcagcaatctacggttataccggtgattaccacttctatggtgtccagattccaattgccgggattgcgggtgaccagcaagcagctctctttggtcaagcagcctatgataaaggttcaatcaagaacacctatgggactggagccttcatcgtcatgaatacgggactaaaacccacgctttcggataacggcttgttgacgacgattgcgtacggtctggacggacaaactcattacgcgcttgaagggagtatctttgtggccggttctgccgttcaatggttgcgggatggccttaagatgtttaataaggcaagcgagtccgaacaaatggcagttgatgccaagaccactggtggcgtttatgtcgtccccgcctttacgggattgggcgcaccgtactgggatcaagaagtgcggggcgcaatgtttggccttacccggggaactgaacggggacatatcatccgtgcaaccttggaagccattgcctaccagaccaaagatgttgtcgatacgatggtcaaggacacccaattaccactaacagcactaacggttaacgggggcgcttcacggaacaacttcatgatgcagttccaggccgatatcttacaaacgccaatcaagcgggcagcaatggaagagacaaccgcgctgggagcagcctttctcgctggattggccgttgatttctgggaagaccaggatgagttacggaagctatcacggattggcgaccagtttgatccgcagatggatccgcaaaaggcagctgacttgtatcggggatggcaacgggccattgcagctgcgcagttttatgggaaagattaattaaaaacaccgctcaccattcaacaaactaatataaaaggaaaatgagagaaatgaaaatgaaaacaccggttcagatgactgatgatttggcacactttattaaggaaacccgggaagacgcggctttccctcatgaatcactctatgttgatttgttagaacagtggaaagttttaagtcgttaccagttagaatacgctgataaggaaagcaaacgcctctacaatgcctactggaactcgatgtcacactggtataagatttttgataaagagcgggagcatttattagaaccaactgccttgcccagtgaggatttaatggacttctgcgcggggctgattgaggatctcatggatcacgtccttagtttggtaccaccatcgccccattcgacgattattaaattaactgacttccgggttttgttgagtaacgagttacaaaaaattacccaacttgacctcgagattcaaggtccgattgactttgcgatgatcatggattattggaagatgttgggtgaaagttttgatcgggaaaagatcaagtaagtgaataaaaaacaggccctgtgtgacaattccagacctgttttttagtttacccacttttgcaagtagtcaatcaatactttcgcgtcctcttttgtcagtgcaaaagtattatcatggctgatattatcaaaatcaatatttgacaccagcatttgtagctcaggctcgtcagcgttctgataaatactaagctcattaacgcactcatcatcacgatcttcgccatcatatttaatatggagccacttagcttgatgatcgatttcatgtttttccacattctcacctcaaaactctcctttcattttagcacgaagctggtgggcccgggtaattactccgcgccgccattgcgaaacagctgcccggctgacactatactcatccgcaatctgccggtcactcaaatggtggttgagtttggcaatcaaatatcgttgttgaacgcgggacagtggtggtagaggtagttaagaaagtcgctattttccaggtgagcaaatggcgcggtcgctgaatggtcaaccattgtcttgccgtagtcatgatcatcttcttcgctgtcgagggtgtaattaaagaggaaactttcaagttgctgccgtcgtaaccggtccagtaagcgccagcgcattcgttgataagcaaagcacatcaagtcccgttcgttttcgacttcatctttctcttgtaagaaatcagcgtaggcctgggcaaagataatcgaagcatcttggacaaaatcatcatagtcgtcccggcgtggtgagatcccgagactcttcaatactccatggacaatcgtgatccgcttatcgctcatcagaaaagttaaaacttcagaaattttttgataattcattcttgagaacatcctttgaaaatattctcaagagctcttgagtaccgttaacttaccaaaaaatctgccgtcttagcgaacgataaaatagggcgaaagtgtcctaaaaagacgttgacagggcagatttatctcagtatcttaatattcatgttaaaagtgaaacgttttacagcgaatttgcacttttttaagatttgcttggaggagataattgtggtacgtaaaatcattgatatgagcatgctagataaattaaaaatcgatggggaggtggcaaactatctggttcagtgggataacaccttactgttaacggcttacgatcaaaatcggacgtttgtcttaactgcggacggggaacagctgcttattcgggaacggttgaaagatgtccttagtcgttttgcacagacgaacctaatttatccataaatttgcgagaatacccccacttctataagtaggggatgaatcgctctcttaaagcacgttagtgctttttcttttgttctatgatatatttagtatatatctataaaatgtggtgataacaatagaattagatagaaatcagcattcagtatacttacttaattaccatttggtaatggtggttaagtatcgtcgaaaagtaattaacgatgaaatatctgaatatcttaaacatcgttttgtagttgtgggacaagcatacggcattaatttgcaagaatggaatcatgatcaggaccacgtacatgttttgtttagagcaacgcctcatacggaaatggctaaatttttaaatgcttacaaatcgtctagctccagaatggtcaaaaaacaatttccagaaatcaagcaatatctttggaaatcagccttttggacacaaagctattgcttaattagcactggtggagcgcctttagaagttgtaaaacgatatattgaaagtcaagggagaaaataatggttctaaaagccgttaaaatgcgcatctatccaaattcagcacaacgaaatcagctctggcaaaccttcggttgtgttcgttttgtatggaatcaaatgcttaatatgcaaattgaacggcgcaagaataatccggaagctaaatttgtgaatgcctttgggatgaataatctgttgaaacaacttaaggttgagtatccttggttgaaacaagcagaatcaactgctttgcaaagtgctaatcgcaatttagccgatgcttttcaacgcttttttaaaggtcaaaataagttccctcgatttaaatccagaaaatattctcagagctacaattcaaagtacgttaatggcaatattaaagttttagattgccatcatataaagttaccaaaactcggtatcgtctattttagagctggtcgattgccaatgggtaaaattaagaatgtcactgttcgtctgaacgttgctggtcaatattacattactgttttagtggaaagcgaaaaccaaactcttcctaaaacaagtaaatatattggtggcgatttaggacttaagtcattacttaatctttcagatggatgcaaggaaccgatcaatcattttgaagacaaataccataaaaagttgtatcgttgggagaaattgcgtagtcgtcggttcttaaaggctcagcaggaaatcgcctgggatcatcataataaagtgttagttccacggcaattagatgattttaagaattatcagaaagctcgtattatggtggcgaagtatcggcaaaagattgccaaccaacggttggatcagctacaaaaattcactactaaattggttaaaaagtacgacatcattgtgttggaaaaacttaatactaagggaatgatgaagaatcaccatttagctagagcaatcgctaacgctagctggtcaaaattagtagatgtgttgcaatataagtgtgactggtacggtaaaaagcttattcaggtcaatccgtcatatactagccaaatttgtgctaattgtgggaagaataatcatcggttaggattgaataagtcggaatggttagcggtacgtgagtgggattgtccaaactgtggtaaacatttagatcgtgatattaacgctgcacaagtcatcttgcaaaaaggattagctatccgatagataaagttaggctcgggacgagccttggctaatagtcgtaacctctgcttgaaggttcgttcagaatcggtagggtaagtatgcgatgtttccagaatctcccacttcaagcattaaaccgtaggtttagctaagtgggagtagttcaatacatggttcatttgatggaagacgctagtgagctagaaagcgataagcggatagaaatgattatgaatggtcgcgagggagataaatatcatattcaaatcgccacctctgaacgtacttttcggcgaattgtaagtgctgcagatgaagttgctaaggagcaactttctctctttgaatattggatgtatcgcctcggaaaggtgaaaagggagatcttcgaacgaacctactttggtgattattgcgtttatacgaaacttcgaaagctagcactcgatctctttatccagacagttttacatatcctgaataaggcccataagaaagtatatggcgaagaaacgccagcagaacttgtaaaagaagtaaaacgggtgataaataagttttaatgtaaaaaatatcacaaaaatgcacaataaataaacattagtccattagcttattataataggtggtgaagaggagtagcttaagtaatagaatggagcatttttatgactgaaaagaaagatgagtgtggcgtaaaatacacactagatgttttagaagatcgctggcaaccacggattatcttttggttaggctttcggccatttaccattgagggattacatcaattgctacctgagttgacagatgttgcttttaaggaagaaataacatccttgcagaacttgcgaattgttaatccagttgttgatgaagaaaacaagtattcattgaccgatgatgggaatgacttacgtaacatggtcctaaccatgagtgtctggggtcggcaacaaatggatgactctgctaaccgagcttccacgcagattgttgagccggaaaaagataccagtatgtcagaattgataaagtataatgagaagcttaatgaatatatgtaatgaacggtgagcgcctaaggaaagttttctgggcgcttttattaggcaaaacaaccaaatttgaatttgtaactaaaatgaaataaacaggtgattaacgatcagatgattaacgatcagaattcgctatttacccgttaaaaggctgatataatcacaaggaaagtgagaaggaacttgatgatttgacgaaagtgtgaaaaagttatgaaattcgtccttgactattcatattacattcttaataatgtattaagtaattataaatttgattgactgacaactgatattaaaaaagttcgcaactcgttatttaccattgttagtgtaggtttctagtaatgtaacttgttgcactagtggatttttttaattacggcgttagtcaaaaatgggagaaattttttatgtcagacgaaaatagtcgacccttgaataataatgatgatggtatgcaacaaccggaacatcaccatcaccaccacagacatcatcggcgtcaccggggatggaagatcttctggtcagttgtaggggtattagtcctagtcgccctgttctttgcgggaatggcatggcacaacctaaaatcaacgaccgatgatatgtatagtagcgcgggtgctaccaagtcacgggatgcgcaaaaggtccttgaccaaaagaagccggtctcaatcctcctcttagggaccgataccggggcgcttggtcgggactataagggtcggacggatacgatcatggtaatgactttaaatccaaagacgaagacgaccacgattattagtcttcctcgggatatgaaggttaacttacctggttatccgcaatattcaccagcaaagatcaatgctgcctatacctatgggggagtcaaggaatcgattaatacaattcaagaccactttgatattccaattgactactatgtattggttaacatgggtggtttggaaaaggcaatcaaccaagtcggtggggttgatgtcaagtccccattgacgtttgattatgaaggctatcactttgaaaagggtgagacctaccatatgaacggaaagaaagcattggcatttagtcggatgcggtatgacgatcccgatggtgactatggtcggcaacaacggcaacggttagtaatcactgctctgcttaagaagtccgtttcatataaaacggttcttaaccggtcattcttacggtcagtatctgataactcgcaaactgatttaacctttaatgatatgatgcggttagcacaaagttatcgtgatacgaacgaacacatcgtccaagaccatgcgcaagggcgagggcaaaatgaagatggtcaagcctttgaagtggtgccaacgagtgagcaacaacggatcaccaacttgttacaaaatagtttaaaaaattaaatacatgaggagtagaagtcgtgaatagttcacaacaaacagcgaataatacaattgatttgcatcggttaatgatgctctgtcgtaaacatattaagatgttaattatttggacattattagccggagtattggggtatgtcgtggcccagttcgtcgtggtaccaaagtatacggcaacgacagaaatcttggttaatcaaaagcatgaaagtaatgataatgggcaagcatataataatcagcaagccgatttgctattttcttaaatgtatgtttcgcccaattttttgctggtcttatttagttatcttagtactttttttgttttttatacttcatgaatttcatattattattaaattctagactatttaataatgtaagtctaagtctcaatcagtatagtaaattggagactgccaaagctagacatattgatatagactgaactcttttagtatggctgaatcgtaaccgcttactttgattacctacacttgtgcacaaatataatcttggctgatctaatataagcgaggtgataagctatgatacaagtagttacaatcaaagactttagaaaatcatttgagaaatacgctgatgatgtggcaaactataatgaaacaattattgttgcacgtctagagcaaaagaatgttgttgtaatatcggaaaaagaatataactcttggcaagagactaattatctattacaaagtaaagcaaataataatactttggctcattctactaatcagttaagtgattctactaaatatcattttttaacacctaaagaatttgagaggatagcagctgatgaccaattatgttgagcaattaaaattgtttgactttcatcaacgtaaatggcaatttgtagaaacaatgccggctgatttgtttgaagaaatccagaaaaaggttcaattagtgattaaataagattgtaattcttgttatagcaaaggcatccccgtattcttttagtgaggatgccttttagcttatccaacaagcaaacaggacagaaaaacgtaaagatattctcttggcgcgttgtaattaatttcgtattcctgttctaacttatttaagcggtaatctaacgtcgagcgatgaatttgaaggtcaagagcggtttgtttcttattctcgtgatttagaaggaagagtttcaatgttttaaatagttctgaattttcttttgctagtttctgtatttggggacttagataactattcaaagactgatcttggcggatatgatcaagaagatcgagagcaatgtaatcatgatattgattaaacgtgtttgctttccccagtcttattgccttaactgcttgttgatagaattgattaaactggtgcagatgagtgaaagaattgctcagccctgcaccagttttatttctaattaaataaggggctaactcttgcataatcgttttggtgatgagcggactgctattttccaccatataaacattgtaatcatcatagtggaaactaataaacctcgttaggatcgttcctaatggttggatattagttgttggagcctttatacataacacacttaatggttggatattagttgttggagcctttatacataacacacttaatggtcgttttagttgatgagggtcaaattggagacgatttttaatttcacttactgaaatgtttggccgcactagaatatcacgaagcaaaccctcaagattgtttccttgtgattgataggggaagttatgcagcccgactgttgctgaaattttatcaatcactgattcgatcgttgatttgtccttttcaaagttagaacgatcaacaataacaatggcaagatagaagtgatctgaattccgtaaaccgatcttttgcaaatagaaaggttggttaaagtcggcaaatcgatactcttttccgttaccttctcttattgaatgcactgcttgcactaaatgttcatttgcgttatctgcaactctaatatatcctgccttaatggtctttaaccaatcaactaggactggcttaccttttccttcactatgcccgagaagctttaaactggaatcaaaaatcaaaagcgaatttgtaatctttgcttgaataacctgtaaaattcgttgaacaggatgcttatacgaaagagcatcagctaactgattttcccatcctaagtagtcaataacctctctttgtaacaaatttaaaagcgcctctggagtccgggtagtgcggatccacgattgttgcttattacttaacgatttaggactaattaggattttacttaccattttattaccctgatatatctgaaacgcagagccagctagcttaaaatttaacgggctaatgtctaattctcttaatgagttagttaaataataatcttttgcgactttactcacaatatgttctagtttcatctgttttctcctacataatgtagtaatttttaggaaataattactgctttattgacgatgatatatgaatttctttctattatactttaaaacataatgtgaaatgaactacaaagtaattattaagatggagaattagtaaaatgaagaaattaattgttacaggtatagatggtaacttagggagagtggcagctaaagaaattcaaaaattagttccagctgaaagattaatcttttgcagctataacgaggatgcgctcaaaccttatgacaaagttggcattgaaactcaccaaactgattttaatcatgcagaagggctaggggatgcatttaagaatggtgaaaaattgctattaatctctatgccgtttgttggtgctaaacgtcaggctgcgcataagaatgttgtcgatgcagctaaagaagcaggtgttgaccaaattatttatacttccttagtcaatgctgatgatccaacaaatccaagtgttgaaaagaaggatcatatttatacggaaaattatattaaggatagtggtctagattacattttcttacgcaactcgcaatatgccgaggcaatgatcactaactattttacctacgttaagggcgatggtattttgaagaacaatcaaggggatggcttaatggcctacatctcccgtcaagattgtggtaaagcggcggcttatgcattggcttctaatgattatcactctgcaatcttaaatattaatggggcagaagcaatgacaattagtaaattcattgaaattggtaatgaagctactgggaacaatgttagttaccaagagattactgatgaacagaactatgctatttttgatgcaatgggtgttcctcgtacaactgatggaaagttcaagaaagactctgaagcaccattctcaagtgacgggatggtaacgtttggtcaagcaatccgtgaaggaaagatgagtttgaaaaccgatgattttgagaagctcacaggtgaccaacccctaaccgttaaatacatgtttgaacactcggacgacttccaaattggtgcccggcactcacaggataagtaagttaaatccgatataatattgctaaggtcaatcagcgtaaatatgttggttgattttttagttcctaactcgtaagaataacagtaacaatagtaattattctaaaatatagattttatactcaataatatggtaaaattatatcgaatatacgctcgatgacggggtgctgtttgtggatacgattgaaatattgagtgaaactatctcgttaattaatcagctctatttgaattataatcaaatatattttagtggacatccaaagatctataaaatgaataaaacatcatgtacagatgcattaaacgaagagatattattcaccattccaaaatatctggatttactaaatcagtataaacttaatgaaattaatacctcttgtaaaaacttattaccatatttaagatatagaataaaaaggtataaaactgcgacagaaaagttaagagctaaaagcttcttagaaagaactggcgaaggtgcttataatattggaaaagtaattaatgatttaatgggttttaggcttattttaccagatgtaaatatgaataaagataaggttaagttaattcttgaatattatagagacaaaggaataatttggcgttattattacagaaaagataatggttataaagcatttcattgttacttcaaggaaaataataaaacatttccgtgggagttacagatttgggatattcaagatgaagaacaaaataaaaaactacattctgctcatgaaaaacaacgagataatattttagaaggaggaggcaataaatcatgattcaattagtcgaattagttacagttgataatgaagatttagcctaccactatggttcagataacttagatgaagtgtttgaacatgaaagattctttaatgaattgattaaagatattccattatcgtttagttcgcatattcttgctacagaagatgcttcatttgattctttatgtgaaaaagatccatattttaagcagtttcttgcatatcacgacttgaaatttttcataaaaaaagtaaaagaaaaaagtcaacttacagatgaggaagtggcgggttatttaaagactcagtttaacttacatgcatttcctcttcaaaaagttctatattatagttatgctgactacttagagagtaagggacatcgtcttttcttagcatcatttcaagctttcgaccatggccctgttgatcgaaaagtatggcgaaaggcccaggataatttaaaggaattgcaagaaaagaattatgattttatccaaaaagcagcattaaatccttcgattaaggaatttattgataattcggtcaaaaaatatgctaatttttttgattctggacagcgatttgagaattcagaccaaaatccaactcataataatggtacgccatgggatagagcatatagtaaaggacaaaatacgctactatctgatgatgatataaaaaagtatcattacctagaacagataccttaactctttatcaccattagtcaaaaatatggaggtacaacaatgttattcattcatcaaaccggttttgcataagtggcctaagtcaattgggccctgaaaggactattatgcaaaatgttcaattgttatgttattcatgactatatttacagtcatgatgacaaagtatatatgtattctgaattggtaaaggcgctgaataatgctaagccgctaatagattttactttctttagtacggtgactctttaccgaaatgttcacagtattaaacgtgtagtgtcaggtgcaggttcctcctttgagattgattgtgatgattgcaaaaaaattgaggaacaaaaattaaaagacttgtacaagaaagctaagcaatggtatgaggttgccaaagcgcatgaagcttgggatggtcagcttaactacctggctcagtcaaatcaacttggtcaggaaataccagttgaaacgattgctaagccttgcaaaccgtggaggccagttcattatttgacttctcattctagtagtggaatcaagcatggacaagtcaatcattcgatgggtgcaaatgcccgttgtactcaccgcaagcgcttatctgcaagagagttaaaagactatccacttactcaccataaccgtaaagatcgtcgccattattttagattcccagtttttgacgatgacgaatactttactgctaagcattcgactggctggaaatattcaactaagtgtcgccatcaatatcagatccatttataaattaaaatcatattaaaaacacccttgacgaattcgccctcgctcggtatactaatcgtaatttatatgagaatttgctgagatcgaatgagtaactaattatagatttaatagagagctgtgactggtgcaatgcagtatttctagcgttagtgaagatggtttgtgagcgattgatcggtgaataattagcagatcacggcgttgctaccgttacccaagctgcaaatttattactatgaataagtttgtttgagtgcaggattttaaatttcctgaatttgggtggtaccgcgtattgatcgtcccttgaaaagactagtttctttttgaggggcttttttatttacgaggaggggataaagatgacaaagattactgcagaattaactaaaccattactaattgatggcgcaatgtcaacggctttggaacaattaggtgctgataccaataactcattatggacggcgagtgttttagctaaccagccagcattagttaaaaaagttcaccaggaatattttaaggcgggtgcccggttagcgattactgatacttaccaggcaaatgttccggcattcatcaagaatggttattcaaaacaagaggcccattcattgatccagcgagcagtcgtcttggctaaagaagcgcgtgatgaatatcagcaggaaactgggatttataactatgttgcgggagcgcttggtccttatggcgcttatcttgccaacggaagtgaatatagtggtgattaccacctcagtaaaactgaatatcaacaatttcatcgaccacgattaactgatattttaacggttggtgtcgatgtgatcgcaattgaaactcagccgcgcttagatgaagtattggcagaattggaccttgtcaaagaactggctcccgataccctatgctatgtcagtttttccttaaaaaattccacacatttaccagatgggacaccgttagcagttgctgcccgtaccgttgcaaagtatccaaatgtttttgcggttggcgtaaattgtattccattagaagaggtaacagccgccattgagacaatccatcaggcaactgataaaccggttattgcttatcctaattcaagtgcgacttatgatccgacaacaaaaacgtggagctatccccatggacgtcgtggtttagttgattacttaccacaatggctcgcggctggattgacaattgttgggggatgctgtactactacgccgcatgatattgccgctttgcatgagtacttggaaggaggcacccatcatgactaagaaaacgcatttagcccgtgaaatgggtgctcgtcatatccagatgattgcgcttggtggagtgatcgggaccggcctatttctgagttctggttacacgattcatcaggctgggccgttgggaaccgttattgcttatttgcttggcgccttaatcgtttatgctatcatgttatgtttaggtgagctgagtgttgcgatgccgtatacgggggcttttcatgtttactccaaaaatctgattgggccggccactggatttaccgttgcaatcctttattggttgacttggacgattgcgatgggctccgaatttaccgcagctggcctaattatgaagcgctggtttcctcagattccggtttggtggtggagcttgttatttatcattattatcctcttatctaacatttttactgtcaaggcatttgcagaaagtgaattttggtttgcggtgattaaagtggttgcgatctgcgcgtttattttgttggggactttagcagtaattggtcttatcccgattcaaggttaccatcatgcacctttgctgaacaactttactaaggacggcctattcccgggtggatttagcggcttatttatgacgatgttaacggtaaactttgctttctctgggaccgaattaatcgccatcaccgcgggggaaactaagcatcctgaaaagactcttcctaaggcgatccatactactttatggcggttagtgatcttctttgttggaagcatgatcgttatggcttctttgattccttatcaaaaggcaggggtaacacaaagtccatttgtctacgtttttagccaactcggaattccatatgctgccgacttaatgaattttgtcgtcctcaccgcgattatctctgccgctaattctggcctatacgcatcaacccggatgttatggtcattagctaatgaaggaacaattccagctgtcatcgccaaaactaatagacgcgggattcctgttttcgccttgctcttaagtatgcttggtggggtgttagctttgctttccagcatctatgcggctggaacggtctatttagttttggtttctgtttctggattggcggttgtctttgtatggattgcgatttccttatgtgagctcatttttcgtcggcgctttttagcggctggtcatcagttaagtgagttaaagtatcgcacgccatggtatccgattgttccatggtttgcatttattgctagcagcctttcttgcatcttaatttggtttgatccccaacaacgaattgccttgtattgtacgattccgtttgtaattgcttgttatgctgcttattatttacagaccttgtggcgcaagtatactacgaagaaaaaggtttcaacagttgttaaatagatgtaaaaaagctgtaattaaaaaattcataacgcgtagtaaaatgtacgaggataatttttaattaggagatataaaatgcattcactatttttactacagttgattcagacagtcttagtagcaatccaattagtaatgatcttctcagctaataaagttaagcgagaatggttaaccgttagccagctgtgcatcgcggtcgtaatcttagccgacttattttcagaattgatcttctttagttatacaagtgtccttactggctgtgtattattcctccagttattcttgctcccaatgttttggaaacagctaaaggcatttgaagaataatataaataggtgagcggaaattaacttccttgacaagacggttaattctcactcacttttttaatcaaaaaagcaccatgagacttactccatagtgctttcctatattattcgttgacaaccatatcatttacatattgttgcagttgtttaatcattttctcggataaatgattaacaataactccattgcgagcatgatagtcaaaattctgtaattgccataaaacaacgtatcctttaaccccggtgctgacactaccatttattaaaatgggcatgtaacgaggattgttagaatagttagcggttgtgattggcatcccaataaacatatgggttgcctcattataggcggatgtactcatgacaacataatgtctgcggatatttccttttttaggattatgtccacccatttcatgtcctgcgtgaagttctgcatcggcaattataatatctccctttttaggaaattccattaatcaattacctcacgtcctacttgttttactggctgtaatgctgggtcgttttcgatatctttttgataatcgtattctttccaatctttggtggcaaaaatatttttcctttttgcaacaggggtaaatacaattgtcttaccaacattctttacggtatattcttctccagttactttaattcctgacggtacggttaacgttcttgaattaccagtttgtctcagtttaacagtcatattacccctccttatatgtatactcagtatatactaaaatggtaaaagaaaaagacctttaccaggacgttcacgaaagtagtataaagtatgctaaaatgataaagattattaagaccaatcaacgttatgtattgactggccttttgtaattttaaatataattaagtgggttttatttatgaagaaaagaaaattaaagaagagtttagcaacaactgcgacggtaatggctgttacaacgggggtgacggccattagtaattccgctaaagctgatacagtacaaaatagtaaaaatactattcaacaaacgctgcctgatacgaaccaacaagctcagcgaaatgtcagtacagcccaagacgcagtgaatagagccaatgctgatgtagcaaccgcaaataatgatcttaatattgctaatcaaaatttggcagacgcggattctcaagcaaaggtacaggaaaaaataagcaatagttcaaatcaggctgttaataatgctcagcaagaatatgataatgttcaaagtgacttaacaaagtatcaacaagagtatcagcgaatactgaaagttccagtattctatttaaatactatgatgaattcagacaaacctttagtatttgacttggcaaactatgatggttacaaagggcagaatgcacaagcggaaaagaattttaaactcaaagcatatcaggataatattgatctcttaaaagaggttattagaagaaaccagagctttgttgacaatgattataaaaatacaccggcttattataacttaggtaccattaattatgaaataaatgcagttaataaggaattaactgagcttaatcaaataatgattgaaaagaaaaagggtacttttaaccaatatcaacattatcatgattggattacaaaggatcgttcgcgttcatggctagatttagaatctgcggatatcagtgatattcaagagataattgattggcatcataaaataatagaagaagatcaaaagaaggctgctgaagtattgccaattgcgaaaaaagaattagaaacaggaaattactatttaagtgtttctaagaatcttttgccacaactggaagaagtgactaacaatcttattgagacacaagaaaagcttacatatgctaaaagtaatttagattcaacaagacggaaagcttggcaagatagtgtactcttatcacaaattgaaggagatcgtgctaatgctcaatcccaagcaatcaatgcgcaaacgaagctcttacaagcacttctcaataagacaaattcacaagaaaagttagcgtcagcaaaagagaaattaccgatgcaaactgatgccttaaagtacagttcgctaatcaaccttgaaccattaacaattgagccaggagaaactcctcttcctaaagttacgacagcgattgcagttgagaatgatcatcaaaataaagctgttattactttacccggcgatgagcaagaaaataagctgcctcagggaacaaaggtagtgtggaaagatgatgctaaagttgcgaccgaccttcaacgtcccggaaagcatactgaagatgtcttgattgtttttcctgatggatcggtagttttaactagcgagcaagttactgtttccgcaacagaaaaacaggcagacgctaataaagaaacttcgcctgcacagaaaacaattgatagtacacaagaaaataatatgcgtgcgaatgatctttctgcccaggtagtggaagttaatgatgataatcaaacctcagcaccagaaatattggtgacttcgcaaaccaagcaacataccgtccgaccaaacgaggtaataaaaggtcaggcagatcagaataagattacccagccttcattagctaagtcttttaagaataaaacaacaaataatattttgccacgaaccggggatgaatcttcacttccgattattgcccttggcgctattattgggctagtaggaattggggcaacacttaaacggtacgaataaatttgtttttcgtcatgctagtctatataatcaatgaaaatacaatatttgaaaggatcgacacatgagtaactggcgtaatctatttgcacaacgaatttatgaacggggtagggattactactatcgcgataaagttaaaaacttaataatcgatgaagacgataatttttctgcaatcgttaagggaaatcgggcttataaagtaactggtagataccataatggaaagttttctcaacttcattgtgattgtccctatgcgcaggataaccatcgttgtaaacatatggccgcggttttagaggcgattgatgatgattcggcaaatattgaaccgcaaaaatcattaggggaggtttttcaatcagcttttccgccaaaccgtttaccagttgatccgcaaagttttctaagtaaagaagtctttccgctacggctgattgaacatgtctttactaatcttgacgatgttcaaattatttctgaaatcctaattaaagctgcagatgcttatttcacaattcctggagctaagtggaattattcagtggctgggcgttttaaacaatattacttttcagtgctagttgcttttaatcgagaaatgattgtggacgtccaggtagactttataaagacaagagaaggacaacagattgctgaaatggttgccctttattacttgttaaggtaccttgatcaacataatattgaagagaatactaatgaagcagcccggcaaatgctagctaattttcttgatcgcgatcctgatagtcagacgatcattactgctaatatcggtgaatactacgatggtggtcaatacctttacttccgggcaggtgtaccagatcatatgtataagtttccaaacttgacaaccttaacaaatgggattgcccgtggtgagcggcttcatttaggaaagttctttgatcagcaaattacccccgaaaaccttgataaagatagtaaacaatggttagacttgatcatcaagctatcctcgaccgctgatttaacgcgcgatgggtattacgaagcatccgtaaaaaatgagctgcccctggctggcgtgattatggatgaagttgaccaaatattaaagaccggtaatatgctttataatcggtggaaagtgcctattaagcgggaagaacgtgcattaaaagcagcagtttcaattaaagcaaatggtgctgatgacgatccaagtcgttaccttgatgttagtgttgaccttccggctgaccttattcgtggacaggcagcctattaccaccttgatgaccatacctggactgcttttacaggaatagcccctgataagttagaccctgtttttccagtaaccagtgatcttgtttttggtgttgatactatgtctgagttttaccgctatgtgttacccaagattcagtcgatgttttcagtcgagatgccccaagatcgcgatttatcaaagtttttacctccattaccaacagtagttttcttattggattatcatgacgaacaaatttattgtgacttggcaactgaaattgatggaaaaacacaaaaaattaagaaaattgatgaccttccgcaatttttgatgcaaagagttgaacaggtactagctaaatatttcaccaagtttaatcaaaccgggactagagcagttctgttagttgatgaggcaacaaatttgctagcaactggcgtcaatgaattgcaagaaataggaattactaaggctactcctgcatttaatgggttatacaaacagccgtttactaaggtaagtgtcggtatctccgttgattctggccttttaaagcttgattttggtgatgatcaactaactgctaaagaaatcaagcaaattctaagagatttccggccgcataaacagtactatcaattgggcaagaaaaccttgaagatggatgaaccttcgctaactgaattagttgagacattgcgcaaaatgggaatctcatcacgtgattttactgcggaagaacttaaattgccggtgtatcgtgctctttatcttgatgatcttttatcccaccaagaagcattgaattatcgtactacttcagaattgcaccagctagttactgatgttaaaactccgcagaaagattttaaggtgccggcaaatcttcatgcaacattgcgtccctaccaatatgatggtgtccagtggctaataaccttaatgaagtatcattttggtggactgttagctgatgagatgggactagggaagaccctgcaagttattactgttctgttaagtgaacaaggaaacggacagaatttaattgttgctccagcggcagttatctataattggcaagacgagcttaaaaagtttgcgccagatcttaaagtaaccgtccttgatggtagtaaagctgaacggcggaaacagttcgcacaaagcacagaaagtgatatcattattacttcctatgatgccgctaaacgagatattgatttttatgaagggcatctctttaatattgaagttattgatgaggcccaatacattaaaaatccccaaactgctgccgctaaaacggtcaaagcgatcaatgctaagcagcgttttgctttaaccggaaccccgattgagaaccggttaagcgaactctggagtatttttgactacttgatgccggggttacttggttcctaccagcagttccgcaaacagtatgaaggaccgattattaaaaatcaggatgagcaagctcaggacgacttaaaacgtttggtacaaccattcatgctccgtcgtttgaagcaagatgtccttaatgatttaccgatgaaaaatgaacaggtatttttaacgcccatggttggtaaacaagaacgcctatatcaggcacgtgctcaaagattgataagacagattcaaaaacagaatgataaagagtttcagcagaataaattagcagtcttggcagaaattactcgtcttcgtgaactatgttgcagtcctcaattgttagatagggggtacagtggtccttcgggaaaaattaaggcaactatgaatttaattaaagatgaaatggcagataatcataaaattttactcttctcgcagttcacatcggcattagcaatcttaaaagaaaaacttgctaaagcaggaattaagtactttgtgattgaaggaaagacaaagaaagcagatcgtttacaatttgttgatgaatttaattcctatgatcagccagccgtcttcttaatttctctgaaagcaggaggaacggggttaaatcttacgagtgctgatgttgtcattcattttgacccgtggtggaatattgcggctgaaaatcaggcgactgaccgagctcaccggattggtcaaaagaataacgtgacgatttataaaatgattgcacaaaacacaattgaagagaaaatcattgaaatgcaacagaaaaaagcagctcttgctaattctattctttcaggaaatgagctagcaaatgccgtcatcaacaaggagacactccttaacatcctcaaataatataggttttgtgaagttttgtcctaagtccctataaaatcccgctataacttgctatacttaaaatattaatatgtgaaaaaagggatgagaagaatggtaatggttgatttgcattgtcaccttttgccggggattgatgatggttcaaaaagtatggagatttcattgcgacttgcaaaagaagcaacagaaaacggggttacccatgcacttttgacccctcaccatatgaacggacactatgtaaaccataaacaagatgttttagcgcgaacaaaagaatttcaggaagaactggagaaaaataatattccactaactgtctttcctggacaagaagtgcgaattaatggtcagctaattgaagctcttgataatgatgatattctatttgctgatgagagtggaaagtatatgatgttggaatttccagacaatgatgtccctcattacactaatcagatgatttttaaccttcaacaacgggggattacgccagtggttgttcaccctgaacggaataccaagatcatggctgaaccggacttgctttatcaaatgttggaaaaagggtgcctatcacaaatcactgctagttcctatgttggtacatttggtaaaaaagtcgaaaaattcagtaagaacctgattgcggctggtcaaggatatatctttgcttctgatgctcatgaccttccaggacgaaaatatgaaatgcgacaagcctttgacaaattatcgcgtgaatttggcgctgacgttgcccaagaataccaagataatgcgcgagctatcattaatggggatgaaattggtcgccatcagattaagaaggttcagcaacgtaagaaattatttgggttattttaaaaaactaagattagttcagagactgtgacataaatcaagttacttttgtaaaagataaatagcgcagtacaacaatggccttcagcgtccggcaaagtcgaatgctgaaggcctattgttgcttgcgggggctcgaaaacgaagtcacaagtgacttctgtctcgctcccttctgtaaaatgtaagattttaagtggatttaacgattttttgcgtatatataatattagagacactatttttaggaggaacttatgcgttttttacatacggctgattggcatattggcaagacattaaacgattttagcttgcttgatgatcagctagcaacctttaagcagattgaagcaattgccaaagaccagcaagttgatgcgatagtgattgccggggatttatatgatcggtccgtgcccaatgaagcagcggttggacttttaaaccagatgctgcaagaattaaatttgactgatcattttcctttactggcaatcagtgggaaccatgactcagcggtccgtttgagtacggggactgattggtttgcttaccagtcatttttcttaaatactaacattaatgatgcttttaccccggtcacaatcaaggatacccagtttttcttattgccattctttgggattcaagaagttcgcaactattttaatgacgacaagattaaaaatgtcaatgatgcgatggcacgaattacagctgagatggaaaagcattttgcccctggtaaaaggcatgtccttgtcgcccatttctttgcggctggaagtaagcgaacggctgattctgaaactttgattgaggttggtggattgagtgcagttacgacagatgttttagctccctttgattatgttgctcttggccaccttcataaccgcaatgctttaaatgacgaaaaaattaagtatagtggctcaccaatgaagttttcagtatcggaagccaagcaagaaaaaggcgtttggattgttgatacagcaccttttaaggccgaatgggttccactatcgccagctcatgatattcaccttttgaaagggagttttactgaactggctacaaaacctgaagaagcattacgggaagatttttatgacattgaattgaccgaccaagaacgaatccccgatgtactaaacaagttacgcgaatattatccgaagattgtcagccttcaccggacacatcaggccaagcaggttcaactcaaccttagtaaaaagcgtgctcaggaatcaccccttgatttacttgcggatttttattcccaaacgatgggaaatggtttaactgaccgccaaaagaagtgggcagaaaaggccttgactcaaatcatgaaaggggaggaataggatgcgtccattaacgattgaactacactactttgggccgtatgagcatcaagtgattgactttatgcagttcatagagcattccttatttctggtagcaggaaatactggtgcggggaaaaccacaatttttgatgcaatgtgttatgcactttttggtcaaacaaccaatgatcgtgatcggtcggctgctgctttacgttctgatttcgcaccagctgaccaagaaacaatggtaaagtttacctttgaacaccaagaccttaaatatcaaattatgcgtcgtcctaaacaggttttaaagggacgccgcggcaatttagttgaacataatcaagccgtcgatcttatttacccgcttgaaagcgatcatccccatgaaattactaaaattaaggaagcagacacgtttattactgacctgctcaacctaacccgtgatcaatttaagcagattgttcttctccctcaaggaaagtttcggcagtttctcgattcagatagcaatacgaaggaagctcttttgcgtgacctttttaatacgtcccgttatgagcagtgggcaacgcaactaaaaaatgatttgcgtgaacagaagaagtcattgacgacccaagaaacaaaacttcaatcattaaaggaaacagtaaccgcgattgatgcgcaattaacaactaaagaatggttagcggaagaaaaaaattacttatcccgactaaaagctaatcttgaacacttgggcgatgatgagcagcaacagcaaaagaaagttgatcagcttgatgcccaacttcatactgagcaagagttgaagaagaatattgaggagttagctgaacttatcaaggctggaaaaacactgcaagctcaagcgggagagatccaagaaacaaagcagcaagtaaaagtccttgaatggtaccaagaacaccagacagaatatcaacggtggaaagatggcgaaaaacgtctccaaaaattaacgttagacaataaatttctccatgaggacctgcgcaaccttcaaaagcaacagcaaacaattgaaaccgacctacaacaaacgagtaagcagcaagaagaaattgatcagcttcaaactgaggtcgccgacttgacgaataaactcccattcttcgatgatcgagataagctaaaatcagctgtcgatgaactacaaacacacttaaagcagcaggaaaaacagcaagctgcttcccagaagaagttgcaagacgctcaacagcaattgacggttgttactaataatttaaaagagcatgaaaacttgggtgaggttcaagttcacatagcaaaacaagaaggccttcaggaaaaattaacgactgctggaaaagatttaaagcaattagaaacaaaacttttatctgaaaagaaaaattgcgcgaaattagagcaaaagcagggggatgctgaaaaactcgttcaaaaatcgcaaggtgagttggatgacttgaatgatcgctttgcccgtcaccaaattgccattcttgctcaaaaattaaagccagccaccccttgtccaatttgtggatcgcttgatcatccccatccagcgaatttagcagatgatggtgaattggtaacggaagcacaagttaaagcagcaaccgttaaagttcaacaaaatcgtagtacgtttgaccagttaaaagagcaagttcgccaaagcgtttcccaaattgctaacttaacaacacgggtagaaaccaagcaggtaaatttagccgaactattaggggataatgaattaccgagtgattgggaaggacaaattgaaaatcacgctcaaaaactagcagaaatgaagactgacctcgatagaatagaacaacaggttaaagaatggcaccgagaagaggaagaattggaacaagaatccaagttctctcaagaagaattagataaaatagacgaaagtgtgaaccgctgcaaacaggatttaatcgctaagcagactattctgaaagaaaaaacagccgctttaccagcaaaatttcctactaaagaagctgctgacaagcaaattcaaactgatcaactaacgatcaaagcctttaataaccagcttgaattattgcaacaacaacgacaagaaaatgccgaaaaattagcagggacaaatagtcggatcgaccagactaaagaagaacttgccacccaaacgacgcaacaggataacttacaccaatatcttgtgaaccttttagcccaatatgatgtccaacttaaatggaatttctggcaagaagctagtgaacaagtagcaacattgtcatcattacgtgaacaggtaacgacctttgagaatcaagtccaggataatcagtcccaacaagagcggttgactaaggccatcaataatcatcccatgccagatattacgtcaacgcagaccaaacttaatactgagcgtgaacaacttcggcaatatcagcaagaaatgggtcagttaactgctcagtataagcaattagaagaaacggatcaaaaggttattaaggtagtcgaaaaaaccggaaaacttgatcaagaaattaatgaattacaaacattaacagatgttgtgactggtaatactgaaaaccatgttagcttagaacggtatgtattacaggcatattttcaagaggtcttagtagcagccaatgttcagttagaccggttaactaatggtcgctaccagtttgaattagcaacagaaagtcatggggctggtgccaagtggagtggacttgaagttaatgtatatgatgataatgctggtagaacgcgaagtgcccggacgctttctggtggtgaaagttttatggcttcacttgctcttgctttagctctctgccagattgtccaagagcaaagtgggggaattaagattgatgcgctctttatcgatgaaggatttggttcccttgatcagcaagctcttgaagatgctcttcattcccttcaagaactcgaaggccaccggatgattggaattatcagtcatatcactgaacttgaggagcaaattccagatcagttaattgttcgatcaagaaatggccgtagttatgtcgcataccagcatgaaatataagttcaaaacagtatttaaatttgcgatgatgaaattagataaaaaattaaaaataaaaagtgcaaaaattagtttttttcgtatatatatttataggggaggtgatttgcgagatgaagacttgttcgttcatagactcctttccccattatttgctgtcttcgtctgcaatcacttccctaatgggagctgtgatatgagtcaagttgctttcataatgaggtgacagcgcagtacaacaatggtctatcatcgcttggcaaagctgttggtgactattgatgtttgcgtggcctccaaaggctaggtttgagtcaaaaaacgaagtaacaggtgattcctgtctcgctctctttcttctcccacaaatctcaatgtaaagatctcttatctgctcttttacgaaccaccagataggagatctttattttttaaataaaaagtgcaaatgttatctttttccgtatatatttaagtgaaggcctaaaaaatgcatttaatgctctttaactccatattatcttccacagtcaaatcggccttcatttcaaaagctaggaaattattcttagctttttcttataataaaaaagtcattattgtggggagggcaataatgactttgaaattatttatcttaatgatttacgatatccagcggcttgcgcttctgcttctgagttaaagtaaaccgcatttgctgaattcatatgatagccttgttgatcagacgtatggtagatttttgaacgagcattaccaacgatcataccggcctgatcggttcgcatatcaccgttattcgatggcgcagttgaactgctgcttgtattaactgctgaactttcctcactactgctgctcgatgatatttctgaagatgattcgctttcaacaaggcgcaatgcattttgaaataggaactttgggaaaccatgagttcgatgaaggcttagctgagtatatgcggattgttaatggtgatgaacctactaaacaatataataaagctgagatggcctatcctcatgtgaaaacagggattaatattattaccgccaatgttgtgaataagtctgatggtcagatcccgtttggaatgcaaccatacttgattaaagaaattcatactagtgatggtaaagttgcccggatcggctttattgggattgaaactacttccctaccaattttaaccttatacgataattacaaagattatgatgttttagatgaggctgaaacaattgcaaaatatgatcaaattttacgcaaaaaaggtgttaacgcaattgtagttcttgcccatataggggtttcaactaataaagatggcagcactaagggtaatgctgttgatattattaagaggctttaccaaattgaccctgataattctgtcgacctttatattgccggtcactcccaccaatatgctaatgctactgttggaagtgtaaaattagtgcaagccatttacacgggtaaagcttacgatgatattatcggttacatcgatccaacaactaatgattttgcgcccaatagtctcgtttcacatgtctttccggtactatctgaaaaggatgcgcctaatatcaaaacagatgcaaatgttacagcaattgttgaagatgctaacaatcgagtagcaccaattattaataagaaaataggggaagctgctacaacaggcgatattcttggacgactacataatacccctactcgtgaaaatgccgttggtgaattagttgtcgatggtcaattatatgctgctcataaggtgggcttactagcagattttgcgatgactaatacaggcggcgttcgtgcagatctgcatgttaatcctgatcgttccattacatggggagtgcccaagcggttcaaccatttggtaatattttgcgggtagttgaaatgacaggggcacaaatcgttgaagccttgaatcaacaatacgacgaagatcaagcttattacttacaaatttccgggcttcgttatacttatactgatcaaaacgatcctaaccaaccatataaggtcgttcaagtttatgaccaacataatcaaccgcttgatatgaataagacttacaatgttgttattaatgactttttagcaggtggcggagatggcttttctgcatttaagggtaccaaagttgtcgggattgttggtcaagatacagacgcgtttattgattatattactgatatgactaatgatggtaaaccaattaccgcactaacaatgaaccgtaagatttacttgactgctgaacaattagcaaaagctgactcagattcacagtcacaaacaggaactaatcggaacactcaaaacgatgctaattcccagactgaaggaaatcagcttcaagaggttccaagccaaccggtatctccaacagtaaccttgccaacaacagctggtcaaccagccgaaactgttacattacacggtcaacctaagcaacaaaccgtagctgctgctaataatcaattaattaatttgacgcctacatcaatcaatggccaaaaacaaaaagtagctgaccagcaagcagctttaccacaaactggtaacgatgaggatcttgcattacttcttctcggaagctcattaatggcagtaaccggattgacaattattgatcgcaagcgcaaacatgcttaattacttaaaatagactgttactttcattatttgggagttagcagtctatttttcactattttattttctcgctataatggaaacgataaagtaaaaatggggtaagaacatggcagaaaatatcatcaatattttaaaaaccaataatatgaccgtcgcgtttgtcgctcaagaaagcggcctcgacgttgcgcaggttaacgaaacacttaaacggcccgttgcaacttggtcaattcagattcttaatgcacttgcagatgctttaggagagcgtccaggagaattattagatcggattcaagactttgatttttacctccatactgacgatgatcaattaacgattcagcacgtgcagttccaaacaccttcttcctatcaacaagttcgttttgccgttgaaagtaatgttttagagggatggaaacctacagcaacagaggtaagacaattaaaagagagtgccgaaaatccagatgatgaaattttaatggaaattgagcagctatttggtgatgaagatgactgatgaagaacttcaagcaaaatttttatatgataatggaacgcttagcaataaatttgcaattaaaaatgcagatgaattaagtttaatcgagtatcgtggtgtggcagaaagggaagtggctctcctgcaacaacaaccgaaaattaaaagctttgaagatttacagacaattaataaattcctttttggttggctttatgactgggcgggtgagttacgtaactactacatttcaaaagcaggttttgattttttggaatatggtcgctttgataatgcaattaagtatattaatgatgaaattgggcgattgaataagaaaaagcagcctaccattgaggattatgctgctctcttaaatgatttgaactatattcatccgtttcgtgaaggaaatgggcggtcaactaaattatttatccagttaattgccctccatcatggccaggtaattgattacccagcagacaacgcggaaatgattgccgggttaaaccaatcagatgtcggtattattgccaagaccatggcattacaaaaaagtgctggttaatttagtttactagctgcttgtttatcaagaatcactgttacgtttggatgctgttggagggctgatgccggaacagcagtcgtgattttaccgttgaccattttgttgattgcgtctgctttttgctcaccaaaagcgagtaagatgatatgttttgcttgcaagattgaaccgattcccatcgtgtaggcttctgttggtacatccttgcttgaagtaaagaaacgcgcgttggcattgatagtagcaggggttaactttactttatgggtttggctatcaaaaggggttccaggctcattaaaaccgatatgaccattattaccaattcctaaaatttgcgtatcaatagggtaagtagccaaaatctgattatagtgattaattacttcagtggcattcagattactgccatccggaataaaacttttggcaaatggcttttgagcgaaaagatgatatttcataaagtaatgataactttgcggatcagttgatttaagaccgacatattcatcaagattaatcgaaataaggttagaataatcaacagaactattagtcattttttgataaaggcctagtggagaactccctgttgcaaggccaagtacttgggcaccgttaataatatctgtttggagaaattcaaaggcattttggcttgctacttctttatttttcgttacaagaattttcatcctcatcacctcacgactattgtaattcttttaaggaaaaagaaaagagcaattgctaatgtaatgcttattctttagatttgacaaaaatattattgaatgcgcttacaaaaatatgtaaaataagggtgttgctgaaacaatctgataagaattggggaaagtttaatgaaatttaaaaaattaacagtaatgtgtgctgttttatcaggtttactattagggagctcggcgatgacggtggttccagctactacctatgcagcctctaatgataagcaggtgacaatctatcttacacgtcacggggaaactactggtaatgtaatgcaacgggtacaaggatcgagtgattttccattaaccaaaaatggaattaccgttgctaatgatttgggctatggattaaaggggattaaatttaagcatgcttacacgggtaacttaacacgtcaagaagttactgcgcaacaagcattgaagtattctgccaatccaaatacaaagattacgaccacaccaatgttacgtgaaggcggatacggtagctttgaaggagatagtattgaagctgataaccagaagattgctaatgtttatggttatcaagatggcaagcagttccagcaagcaacgggcaaagattactggaataagctccaagatgcctaccacaaacttgatatggacaattcacaaaataccaagttggctaaaaatgatcgggcagaaagttcagctcaggtgcaaaaacggatgaattcagaattgcttcacattgcaaaaacaactcaaaaacagggtggtggcaatgttttagttgttagttcaggaatgtcaattaatgaatatctttcaaccatttctaaaaaatatgatgggaagccaatgcagaatgcggcagtaaccaagcttgtttataagaatggcaaacttcacgttgatggcccaattggtacgcttcactatgtaaataaaggaaagaaaatagcagcaaataagtaaaatgaattatctttcagcaacacatatgttttttgcaattatcgaattattatttggggactctttgatcagaaatcagggagtctttttttggaagggagatagtaccaatggaaaacttaacggttaagctgtttggagaaattactgaaaagcagcttccgggtttagcattatttgaaaatcgaattggctctgggaaaacaacgggtgccctgcagtgggtaacggacatgctaatgaaaagtaaggaatctgatgtcattatctacataactcccaaccgacagaatcgagatgaagcatggcggggattggttagacaagcatatcgaagaattctttgcgacgaatcagttaaacttaatcgataatcggatcgcaagggatgaaaggatagaagatatcaagatcgcgttggttcagcttctaccaacagttaaaatcaatattagaccgaccgttgaagataaatttggatataatctagtggtgattaataataagcggtatttccaaactcatgaagatgttaaagataattatgcgagagactatcagcaggcaatagtgcaacatttgacaattggaagtacgttaattaattcattaaaagagttgataataaagaaagatttgaaagaaagaagcttaagtctgtatcattaactagattcaatagtgggatgggagttttatcaagttgcaaaggaagcttatggtacccaagcagtctatctatttaaaatgattaatagtgatgagttcgaggtgagacggttagatttacaagaaagctcaaaatttattaattctgatgatacagatcttcagtacctaattaaaactcctgccaatactttctacaatttaaacaggaaaaatatctttactttgcctaatgctgagctttttggcgatatcaacgagatgattagtcatcaaaattgttcatcagtaacaaaagcggaacttaaacgggctttgaatgatttaagtaaaagttaccctaattacagaactaaataccaaaatcttatttctatcattaataaaagagagctaaattcatttaacatcaatgacttaaaagatgaatttaattttattaagaaaaataaaatactaagtccaattgcaattaatttgttattggatgaattatatgaacaatatggactagttttgaaagtgaaaccaaaaataaaatcccatgttcaaaagcatctctctggattaaccgatattaattatttcgttgataacggcgatcaggatgttatttactataatgtaggaaccattagtaaaaatatgaatatatcaattgcaaaggcatcacacatctggcaacttcagcctaacattaaattaaatgagcgtggtttcgctacgattgagaccgaaaatatcttgaagtttcttcaactgatgatggtgaattttgtacgatttcatcaattaacagtaattccttttccatttaaataccttcgagaatttattcaacttgaagaaaagatcagctaaaaaagatgtgacagatttactgaaatgatgagataatactaggagggatggggtgatgatggtgaaaagtactaaaaagaaacgatcacatattgggttaattatatttactatattactggtaatcttgttaggaattttaggggtaaattataaacggtttgctagtaagcaacttaacccagttcgtgacaataaagtagtaaaaaaagattcgcctaaaataacaaagactgcaaagattgttggatcgtatcgagatgatcaagacggtgcagctattgccttaaatgaaaatggaacaggtcagtatgtttatgcagataagaataatccggatacagatgatagcttaacatggcgtaaagaaggagaacactaccttataaatttggaagatcgtgacgtaactaatccccttaccgcaacgcttgataataataaattagttgttacaggtagtaatggctggaataccgaaacattccaaaaagttaatgaagagttaaaccttcaacaatttttgaatgatatgcataaaaaataaaataaatgcttgtaaaggatttagagataggatataataaaatccctgtcagcgatgggagatagataatcgcttgtaacttcttagatttatttaacttagttgcaaagtctcaacaataatttaaaaatattattgacatcccatcgacaacatgatatattaataaagttgctgattgagttatagatctaaaggaattcgaaattgattaaaatttattcttgacaagccaatccgatatatgttataattgctgtgttgggtggctacttaattagccaacaggtagacctttgaaaactgaacaaagtttcgacgaatcaaatgtgtagggtcttcaatcacgatgtgatttgaagcaaaacatttgcgaagtcaattcgcttaataacaaagataatttagagctattcaagttcttatatattttatatgagagtttgatcctggctcaggatgaacgccggcggtgtgcctaatacatgcaagtcgtacgcactggcccaactgattgatggtgcttgcacctgattgacgatggattaccagtgagtggcggacgggtgagtaacacgtaggtaacctgccccggagcgggggataacatttggaaacagatgctaataccgcataacaacaaaagccacatggcttttgtttgaaagatggctttggctatcactctgggatggacctgcggtgcattagctagttggtaaggtaacggcttaccaaggcgatgatgcatagccgagttgagagactgatcggccacaatggaactgagacacggtccatactcctacgggaggcagcagtagggaatcttccacaatgggcgcaagcctgatggagcaacaccgcgtgagtgaagaagggtttcggctcgtaaagctctgttgttggagaagaacgtgcgtgagagtaactgttcacgcagtgacggtatccaaccagaaagtcacggctaactacgtgccagcagccgcggtaatacgtaggtggcaagcgttatccggatttattgggcgtaaagcgagcgcaggcggttgcttaggtctgatgtgaaagccttcggcttaaccgaagaagtgcatcggaaaccgggcgacttgagtgcagaagaggacagtggaactccatgtgtagcggtggaatgcgtagatatatggaagaacaccagtggcgaaggcggctgtctggtctgcaactgacgctgaggctcgaaagcatgggtagcgaacaggattagataccctggtagtccatgccgtaaacgatgagtgctaggtgttggagggtttccgcccttcagtgccggagctaacgcattaagcactccgcctggggagtacgaccgcaaggttgaaactcaaaggaattgacgggggcccgcacaagcggtggagcatgtggtttaattcgaagctacgcgaagaaccttaccaggtcttgacatcttgcgctaaccttagagataaggcgttcccttcggggacgcaatgacaggtggtgcatggtcgtcgtcagctcgtgtcgtgagatgttgggttaagtcccgcaacgagcgcaacccttgttactagttgccagcattaagttgggcactctagtgagactgccggtgacaaaccggaggaaggtggggacgacgtcagatcatcatgccccttatgacctgggctacacacgtgctacaatggacggtacaacgagtcgcaagctcgcgagagtaagctaatctcttaaagccgttctcagttcggactgtaggctgcaactcgcctacacgaagtcggaatcgctagtaatcgcggatcagcatgccgcggtgaatacgttcccgggccttgtacacaccgcccgtcacaccatgggagtttgtaacgcccaaagtcggtgcctaacctttatggagggagccgcctaaggcgggacagatgactggggtgaagtcgtaacaaggtagccgtaggagaacctgcggctggatcacctcctttctaaggaataaaacggaacctacacatcgaagaaactttgtttagttttgaggggtttaccctcagagcttgtactttgaaaactaaatactatctaatttctttattaacaaaacaataaacgagaacaccgcgttatttgagttttaattaacgaattataatcgctaactcaattaatcagacaatctttgattgtttaggttaagttatgaagggcgcatggtgaatgccttggtactaggagccgatgaaggacgggactaacaccgatatgcttcgggagcggtaagtacgctttgatccggagatttccgaatggggcaacccaatcagcttagtcgctgattacttgactagtgaatacatagctagcaagaggtagacgcagcgaactgaaacatcttagtagctgcaggaagagaaagaaacatcgattccctgagtagcggcgagcgaaaagggaagagcccaaaccaacaagcttgcttgttggggttgtaggactgaacattagagttaccaaagtgcgacgtagtcgcaacagttgggaagctgtgccatagagggtgaaagccccgtagacgaaacgtcacactctctgttcaggatcctgagtacggcgggacacgtgaaaccccgtcggacccgcgaggaccatctcgcaaggctaaatactccctagtgaccgatagtgaaccagtaccgtgagggaaaggtgaaaagcaccccggaaggggagtgaaatagttcctgaaaccatgtgcctacaagctgtcggagcccgttaatgggtgacggcgtgcctcttgcagaatgaaccggcgagttacgattgcatgcaaggttaaggtggaaaaaccggagccgtagcgaaagcgagtctttaaatgggcgtaaggagtatgtagttgtagacccgaaaccaggtgacctacccatgtccaggttgaaggtgcggtaaagcgcactggaggaccgaacccgtgtcagttgaaaatggctggg

SEQ ID NO: 53 - DNA, 12147 bp, synthetic construct
  misc_feature 1..12147: note = Based on Lactobacillus reuteri
  source 1..12147: mol_type = other DNA
cctttcactgacattaatgcttttttcatctcattcatttcatctgctgtgaaaatatgtttaattccattttcaaaatacatgatatttttcatcaatttttcctcctacaaattaattactccatcttcatcggctgcaatctcatatcggttcatgatactctgcaattcatattctaatcgctgaaaatcggccacaaacttcttcgccatctcaactgacagccgattttctgttggcgtttcttttaataattttcgccaacgttgccgagttgcctttggtgcatcaccataaattgatgggtcaatcatcaatgctaaaatcattgcctgttctcttacggttggcaaatttttatacttgggaataaaaaattgttctaacattttttgaactaatttcggataatcctgcactttattcccccgcaactgcaactcaactcgccaccaactttcaacattaactgtctttccatgacgagcttcttgttcaacttttttgttatactggcgaatctgctgaccggatttcatggatccataataagtcgtttccatttggcctttctggttcataatcacctgtttacccgtcccaaaacgccatacctgataatctttggctgttggttcattaaataaatcaaaggcaatatcacaccgactaaaatgtttatcctgaatcgacgcaattaattttaacaaccactgaccgccctcactttgtaacccatggttggggttaaaatcaattctaattttatctttcaaaaattttggtgagttaataaaggcgacttgttcaggggcaacatacgcatgacggttgccaaaatcatcttgataacaattactgtcatctaccacttgaatcccaccattaacatcttgaataaatgattttctcagccactctcgcatatcattatttaatcgatcactgtcataatgacccacaacggtaatccgatcaatcgatactcgaatatccgctttatgtttaactacttcattgcccataataaaaaggctccttcctaccacgtggtaagtcgggaacctacttgttgtcttttaaatgactacttaatgactacaaatcgatatcgttttcgtgttatactaattacgttaatcaaataatagatttccaactcacgtgtatctgatcgccaaatctttgatacccacgtgggtttttctttttgttttattttcatttacgagtttaattttaccacattcacattcccaaaattttaaaaagtctcagtaatgagtactttagctggctgttagacggagccagctaaaaattcacttttttcaatttcacaaagtgaacatggcaactttacaaaatagtagttagctcatcagctaactgcttagttaatttatcgatttccggtttctgataacccatctgtttcaatcctctctcaaagctagttcgtaatagaccatgcgaaatcgcaagctcatgataaccattaagccaaagtttagttaattccaaatctgtcatttcagcccctcctttgcagatttaatgctcaaacagatactaacccctgtggaccccttgctctttgtcggaaatccagcctattagctggctctccgacccgcaagcttatcacaggggttctctgttttgcgccttaaaacctgcttattaacgttctctgcccttattatgcttgaactgcatctgattcgtgttttcttttgtaggatactgcttagcaatctgattaagtagttctttttgatcttctggcactttcgtatctttagtccaaggtaatttattattatctgcaaaataagcatcaatttgctgccttaattcaaactcactgtttaataacgcatcttcagtagtcacacgatcaaacatctctttcctcaagatttcatcttctggaattctcgaagacaatcctattttgtaagccaactcatagttttgtaatgcctggttttggtcattaatgattttttcataaggctttttaacttctaacttcgttaaagcatcatccaaattcttgtatcctaaatttttactcatttcttcataacgattgattttttgttctcttttaagaagcttttcccaacgctcctttaattttcttacaaattcttttagccattcaaaaacataaggtaatgtacttatctgccgttcattttcttcgtcccagtgtccatatgattccggacttctagataatcgtacttcttcttcaggagaaattgttgggcgatcaggttcgatttcatcagcaacttttgttatctgtctttctaattcatctaacacatcgcctttttcatcaagctctatcttttggaactctaactgctcacgttccccttggactttatcctccatattcttaatatttttgacttgctccattgagcgtccaacatctttagtacccttacgataaaactccaagcccttaaatttatctggatattcttttctaaactcacgctctaaaatgcaagccattttacgatcaaaaaccgaacgataccactttaatgcttctcttccactggcctccttctcacccgtagcacgctcataaaaatttactagggtctggtttaacgaattgcttacacggccattacgggtcttcccagtggcatacagctcataatgaatatgaggtgcccctgcttcgtccacatgaatgctatatgctcctggaacaaaataattaaataactgtgcaccattcattttgtaattagtcgatacaaaatcacctaatgctttttcatataccccataaaattttttagctacttccgaattagtgataacaagtgttttgccatcgggacttgatggaatatcaattgattcatagctacctttcggacaaagctgttcaattaattgattgcgattctccatatcaccaactgtcgccacaacagtaatcttcttttttgatttcaaaaactttttaactgaaccaaatactctctctggatgacgacttttaatcgcattttgatcatgctttcttacatagtcgccaaaatatttttccattttttgatcaatttccgcttgtgaaaaaactcgaccattaacattatattgagttaagttttccaaaatatctttgttcgaatgctcaacatttggatcatgttcaacatgttttttgattcccgaccacccatttgcagtctttgaaaaattaattgtcgatgtaactttcactactcactacctcctaatgccgcaaagtaattaacttcagtataccacaatatttgcgcgcaaatatagctccttagaatttttgcgcaaggcgacaaaaaacggagccctgtctggggattgagtttcactcaaagggaccatttcatggagagtcgcttttgaaaaaagcaacgcaaaataaaaaaagtgcttcgctttagcgagcgcactttttcggttcgtcaatcgagactgcgttcgattttcctcacaaaaataattgctgtttaaacgcaattatttttcacaaagtcggcagcattcatcaacttaatctaaataatccaagaagatcaacttcaaattttgcaaagcttccgaatttcctttcactgacattaatgcttttttcatctcattcatttcatctgctgtgaaaatatgtttaattccattttcaaaatacatgatatttttcatcaatttttcctcctacaaattaattactccatcttcatcggctgcaatctcatatcggttcatgatactctgcaattcatattctaatcgctgaaaatcggccacaaacttcttcgccatctcaactgacagccgattttctgttggcgtttcttttaataattttcgccaacgttgccgagttgcctttggtgcatcaccataaattgatgggtcaatcatcaatgctaaaatcattgcctgttctcttacggttggcaaatttttatacttgggaataaaaaattgttctaacattttttgaactaatttcggataatcctgcactttattcccccgcaactgcaactcaactcgccaccaactttcaacattaactgtctttccatgacgagcttcttgttcaacttttttgttatactggcgaatctgctgaccggatttcatggatccataataagtcgtttccatttggcctttctggttcataatcacctgtttacccgtcccaaaacgccatacctgataatctttggctgttggttcattaaataaatcaaaggcaatatcacaccgactaaaatgtttatcctgaatcgacgcaattaattttaacaaccactgaccgccctcactttgtaacccatggttggggttaaaatcaattctaattttatctttcaaaaattttggtgagttaataaaggcgacttgttcaggggcaacatacgcatgacggttgccaaaatcatcttgataacaattactgtcatctaccacttgaatcccaccattaacatcttgaataaatgattttctcagccactctcgcatatcattatttaatcgatcactgtcataatgacccacaacggtaatccgatcaatcgatactcgaatatccgctttatgtttaactacttcattgcccataataaaaaggctccttcctaccacgtggtaagtcgggaacctacttgttgtcttttaaatgactacttaatgactacaaatcgatatcgttttcgtgttatactaattacgttaatcaaataatagatttccaactcacgtgtatctgatcgccaaatctttgatacccacgtgggtttttctttttgttttattttcatttacgagtttaattttaccacattcacattcccaaaattttaaaaagtctcagtaatgagtactttagctggctgttagacggagccagctaaaaattcacttttttcaatttcacaaagtgaacatggcaactttacaaaatagtagttagctcatcagctaactgcttagttaatttatcgatttccggtttctgataacccatctgtttcaatcctctctcaaagctagttcgtaatagaccatgcgaaatcgcaagctcatgataaccattaagccaaagtttagttaattccaaatctgtcatttcagcccctcctttgcagatttaatgctcaaacagatactaacccctgtggaccccttgctctttgtcggaaatccagcctattagctggctctccgacccgcaagcttatcacaggggttgtctgttttgcgccttaaaacctgctcatttgcgttctcgtcccttctcaggcattttaatctgtgcatgggagaatttatcgtttgaacgttctaaatgctcagcgagcttctcagccggttttataataccttcctcaacttgcattcgataaaattgcggttgcgcaattggacttggtaactcaaaatttttctcaaattccgcaaatgccttttctttcgcagcaatcgttttttcccgctccgagagttcctgatctttttgtttcagcctttcaaagcgccgtttaagctgttggcgaaccatttcaatcacctttcgcaaggattgaaaaacatattcaatatcaaattgcttagctaatttaggaattaattcagcatgttcagaaagctttactcgctcacctttttcgtctttcgccgtaacttccggattaatttctgcaatggttttcagcccttgctcttttaatttagtttcatgctggcggttctgcttaatggtgtcctgtacatgcttatactcgttaactgataattttttccgttgcgaattttctgaacctctcacgacttcatagccttgttcttgcatgtatcggggaaactcggtctggattgttcgcaatgtgttacggtcaaacacttgttttgagcttaactttccgtctttggtcatcgggacaattcccatatgcatgtggggagttgtctcgtcataatgcacgctggcatacatcacattttctgaaccaaatttttgctggaaatatgctaatgctgatttaaaatacccctcatttcgctcagaatgccccgtatcgaagaattccctatctgacgatataatccactcatcgaccattacagcgtctctacggagcttacgtgagcttctacggcgtttattaatataatcaacaatatcttgcttatgaagtttatgatctgcaactaattcaatattctgatctgatttgttcgggtcaatatctttatttttatgatttttagtctctctaaaatcatgacgaagcataccagataagttctcagctttcattttcttcattgtggcgacggcataatgtgacattttaacccctccaaagtctactcaattaaccaacttaaattatatcacctcggatgcagttaactgctatttttttcggtataacttccatgtaaagtataacccactatactttaccaaggtaaagagtgggctctccgcgaggctcgtctgcgacgccgttgcgcgtaagtatacgcgcaagtctccgcattcgctccgacctgttccatctgagactcaatcgaatttcgcctttaggctcattcgagtttcgttcagatttcactctcgtatttttttgagattcgcctttaggctcattcaaaaaattactcacgatttgccaatcaaaaaattggcaaatttcgcttttttcacaaaaaagctcagcaaaaaatcggacagttttgcacccaaattctgaccaatgaccaacgaccacatagggggggtgtcgtagtaccccccaatgagtcgagataaactcttactcccccaagcgttcaagccgtatttcctcaactagagggggggttacacttttaaattttaaaatctctgtattccttggggctgtaagatgaccaacgaaagcaaaaaagtgtaaccccggttacacttttttgctttctatttctttaaatatttatttgaactactcccacttagctaaacctacggtttaatgcttgaagtgggagattctggaaacatcgcatacttaccctaccgattctgaacgaaccttcaagcagaggttacgactattagccaaggctcgtcccgagcctagtagtttcatcggactaccgcctaagtacgtgttcaaaatacatactggcttggttttcgccagctatttttagcctgattgcaactcgtggcgttgtctcagcacaaactcgaagttactctatacgaaattactcagtgtcctcatggtgaagcaatgttaacagctttattttcgatgcattagaaccagtttaattagttgaattatatcatatcagagggctattcatcccccacttgtcgaagtgggggtattctcgccaattatggataaattgacagcatcaatcaacttaatctaaatattctaagaaaattaattttaagttttgcaaagcttccgaattgcctttcactgacattaatgcttttttcatctcattcatttcatctgctgtgaaaacatgtttagttccatcttcaaaatacatgatatttttcatcaaattttcctcctacaaattaatcgtatcgtcttcatcggcggccacattaaagcgattcatgatactttgcaattcatattccaatcgctgaaaatcttccacaaacttctttgccatcgccaccgacaatcgattatccttttgtacttctttcatcatcttacgccaccgttgttttgttttaggtgatccactggcataaatagatggttcgtacatcatcgcaaaaaccattgcttgttggctaggatttttcaatgacttatattctggaacgtaaaattcctccaacatttttcggactaagcttggataatctgcaatcttatttccgcgtaattgcaattcaacccgccaccaactatcaacattcactaactttccatgacgggcttgttgttccaactttttattatactgacgaatctgttgccccgatttcatcgacccataataagtagtctgcatcttcccatcgggtcccataataatttgttttcccgtgccaaatcgataaacttgataatcttgggcagtgggttcattgaaaatatcaaaggcaatatcacaccgactaaaatgcttattttgcaacttggcgatcaattgcaaaacccactgaccaccctcgctatccaagccatgattggggttaaaatcaatccgaatcttatccttcaaaaatctaggcgagttaataaaggcgacttgttcgggtgccacatacgcatgccgattaccaaaatcatcttggtaacaattgctatcatcaacaacttggatgccatcactaatatcttgcacaaacggcttcttcagccactctcgcatatcatggtccaacctgtcacttggataagctgctactactgttaatcggtcaatcgataccttaatttctggtgctttctctacaacttccttacacataataaaaacaggctccctcctgccacgtggcgagttaaaacctgtttctcttatgtgcatcattttgtcatcactatttattttattaatatcattttcatgctatactaataacgttaacaaaataacatacaggttttaactcacgtgttcctagtcggccaaaactatgaactgcacgtgggttttcttttttgatttatttaatttacgagtctaattttaccacattcactaactggaaattttaaaaaatggtcatatgtgactattttagctggctgttagattgagccagctaaaaaatcatgttttttaaatttcacaaacttttgtcattctactctctatccaaaactgacaaaatataatcccgaatcagattttttgtccacgccggaacttttttcttttctgtcaactcattcaaaatcaaatacgcacttcgcaaatcactgatggttgcatccaacttttcttgttcttctgccgttaaatcaccaagctcccaatctgtctgaatgtcctcaacttgcttcccaaaaaccttttggtacctcaacccacttttcgcatagtccgaaatcgtcattccttgacgagtagaatttaaatccaacctcatcttttcctcacgagttaatcgtacccgtaaataatctgtttttgtttccatttttctacctcctttctgtttgttaccacatttatttattgatatattaacatttatttgtggtaacgtcaaaacaaaaaggcgagaattctatttaaatcctcgccaataatcgctataataaaaatgtgcactggcaaccaccaatgcacaagttagtcttaggagctgatacctcttgaaggtgtactcttttgcgcttggctggtggtgtattgctgtacaccagaacaagagcgctaccgttaagctatcagcctaattgttgaatataatatattcttctaggtgtttatattatagcatggtttagcgacttggacgaccgtctagctatctggctaggcggtttttctgttaactggcagatttaatgctcaaacagacactaacccctgtggaccccttgctttttgtcggaaatccagcctattagctggctctccgacccgcaagcttatcacaggggttgtctgttttgcgccttaaaacctgctcatttgcgttctcgtcccttctcaggcattttaatctgtgcatgggagaatttatcgtttgaacgttctaaatgctcagcgagcttctcagccggttttataataccttcctcaacttgcattcgataaaattgcggttgcgcaattggacttggtaactcaaaatttttctcaaattccgcaaatgccttttctttcgcagcaatcgttttttcccgctccgagagttcctgatctttttgtttcagcctttcaaagcgccgtttaagctgttggcgaaccatttcaatcacctttcgcaaggattgaaaaacatattcaatatcaaattgcttagctaatttaggaattaattcagcatgttcagaaagctttactcgctcacctttttcgtctttcgccgtaacttccggattaatttctgcaatggttttcagcccttgctcttttaatttagtttcatgctggcggttctgcttaatggtgtcctgtacatgcttatactcgttaactgataattttttccgttgcgaattttctgaacctctcacgacttcatagccttgttcttgcatgtatcggggaaactcggtctggattgttcgcaatgtgttacggtcaaacacttgttttgagcttaactttccgtctttggtcatcgggacaattcccatatgcatgtggggagttgtctcgtcataatgcacgctggcatacatcacattttctgaaccaaatttttgctggaaatatgctaatgctgatttaaaatacccctcatttcgctcagaatgccccgtatcgaagaattccctatctgacgatataatccactcatcgaccattacagcgtctctacggagcttacgtgagcttctacggcgtttattaatataatcaacaatatcttgcttatgaagtttatgatctgcaactaattcaatattctgatctgatttgttcgggtcaatatctttatttttatgatttttagtctctctaaaatcatgacgaagcataccagataagttctcagctttcattttcttcattgtggcgacggcataatgtgacattttaacccctccaaagtctactcaattaaccaacttaaattatatcacctcggatgcagttaactgctatttttttcggtataacttccatgtaaagtataacccactatactttaccaaggtaaagagtgggctctccgcgaggctcgtctgcgacgccgttgcgcgtaagtatacgcgcaagtctccgcattcgctccgacctgttccatctgagactcaatcgaatttcgcctttaggctcattcgagtttcgttcagatttcactctcgtatttttttgagattcgcctttaggctcattcaaaaaattactcacgatttgccaatcaaaaaattggcaaatttcgcttttttcacaaaaaagctcagcaaaaaatcggacagttttgcacccaaattctgaccaatgaccaacgaccacatagggggggtgtcgtagtaccccccaatgagtcgagataaactcttactcccccaagcgttcaagccgtatttcctcaactagagggggggttacacttttaaattttaaaatctctgtattccttggggctgtaagatgaccaacgaaagcaaaaaagtgtaaccccggttacacttttttgctttctatttctttaaatatttatttgaactactcccacttagctaaacctacggtttaatgcttgaagtgggagattctggaaacatcgcatacttaccctaccgattctgaacgaaccttcaagcagaggttacgactattagccaaggctcgtcccgagcctaactttatctatcggatagctaatcctttttgcaagatgacttgtgcagcgttaatatcacgatctaaatgtttaccacagtttggacaatcccactcacgtaccgctaaccattccgatttattcaatcctaaccgatgattattcttcccacaattagcacaaatttggctagtatatgacggattgacctgaataagctttttaccgtaccagtcacacttatattgcaacatatctactaattttgaccagctagcgttagcgattgctctagctaaatggtgattcttcatcattcccttagtattaagtttttccaacacaatgatgtcgtactttttgaccaatttagtagtgaatttttgtagctgatccaaccgttggttggcaatcttttgtcgatacttcgccaccataatacgagctttctgataattcttaaaatcatctaattgccgtggaactaacactttattatgatgatcccaggcgatttcctgctgggcctttaagaaccgacgactacgcaatttctcccaacgatacaactttttacggtatttgtcttcaaaatg

SEQ ID NO: 54 - DNA, 11403 bp, synthetic construct
  misc_feature 1..11403: note = Based on Lactobacillus reuteri
  source 1..11403: mol_type = other DNA
atgctagctaacgctagtcctagtgataaattgtctaaacgcttgcaagcaatctttgcccaagcatctatttctcggcgtgatatgttgggtgcaatgattggcgccggtatgaatattgctacagcaaaaagtgaatcatttgcagtgaatgaactcaaacagcagtatatcgatggctataataattcaagccctaataaactatcaacagttccagataaagtagccaaccaagctgagtattctcaacgaatttgggtgcatggcgacgtcatgacgacacgaatgaaagaaaccctgaacaagggtttgagtcgccgcatgaagaaatcagacatcaataaaatgacccgcagtattcctcaaagcggtgatcgaattgatgacaatttaacaacgcctatgaaccaaatgctatccagaattcatacgttaacaactaatgaagctatacgcaatagcaacggtggtaagaatagagcgtatgatgaacagaatgttcagtatgtgatgtggttaaccgaggaagatgatcgtgtttgtgatatttgtgaaccacttgatagacaaacatttgcctatggacaagcaccgattccagtcacggatactcatccaaggtgtcgttgccagctggtagcctgtgatgaagatgggaatctgctgtctggtgaacttgatagggtatttaaggaacaaaaaaagcccacttagtttaaaactaagtgggtcaggaatattattaattggctccgctcacaacaaagtcgaggggtgctaactaagttagcatctataattagcgatgcgttcatgactatggacagtaagattaacatcttttagtacaggcttagaaaagctttttgatacatgacttaaagttaataataatgaatttggattagatgatcctgtaatcaaattttctagactaacgtttaagatccttgctaaagcaattaaattgtccaaattaggttctgtatcaccattttcccattttgatactgcctgacgagatacaaaaagtaaattagcaatatctgtttgagaaagttgctgctcagttcgtaatttgagtagctgatgagcaaaagcattgtgcatattaatctccccgttctattaaaattgcatagtttatttctactaacatttttgttttacgtcaatataatccctagataataatgtttgcgtaactagcaactaaatgttgctagcatacagacgtaaagctagcagatacttaaatcaaagtatgaggggaatatggagttgtaatgattaaccagattgataagaattaggctagggtctaatggaatattttccaaaagaagctatgaccaatattatctgtttcttcttttggtagtttagctggtaatgatttttgctgttgatgtgtggttaaatctaattgttgagcctgatcagcaagcttattagcggtagcaatttgttcatctttaatagttaattgcttctttaacagtttgattatctcagcttgttcattaactctggccgttaattgattgatgatatcgtctttagttgcatttttgtgctgttttacctcagaattaggtttaaactgataatattttttcatttcctgataaacgctgttactgtagtatttagcgttgtgatttccagttttaacaggcttaaaatgatgtttttggataaaacgagaggctgaaactactgaaatgctgaattcccttgctaaatctgaggttgtatatgttttagttttacttttatccatgttttagcctcctttagcctaattctagcatataattgttattgctatttgataggaattaagtttatacttaacaagtaagcgttatacgcctactaacagtttaataaatttagagtaaagaaaaagcccgttaaagtactccaatactttaacgagctaccgattaactaggacaagtagtaaatcggggttgtctatttctttaatacaattattgtaggggaaatagatggatatttcaagatataacactataaaactattactgaaatcaaaccctaaaatactaaaccgactagttaatcgctagtcgtttttttcttttggttcgcaaccggtaaactcaaaagcggcggcaccgcatcgtagtagcatctcgaaaacgcccgtgacctcttggatgtatagaggttgtagtcaacatcatgggaaagccaatcccgtacgctttacaaacgtcaaaagagcggctataggaagccttggaaatgcttcagataacccataacattatttagtgagtctttatgatggtttctcacagttgcgacagcttaatttgctgcctagcggacaaaaagaaccagcccgctgaacagggtataggtggaaacacaagagcagaatgttattgggacaagggcagggtgcgtttaaactatctgcattgcaattattaatgagcttagtagtgttaaattactgagttgatcaataattgcgatgagtcgactgagagaacaatgctctctcgagacttagccactgacaggctaagtctcgagagagcaagctggagcaagttctttgcggaagcttgctcttcctttaataggttaaggataagtgggtaaaacttatagttaaaactgtctttcatcgtctttgttaaggcgtttgttcattgcattggtaatttgctgagtagctttttgtctttgtttttgattagcaaatagaattgccttttgtaatttaaggatggggtcattattgagcttgttcattagctgtttttctctttggtaatcaaatggatgtttagaagcttgaattgtagatggatctagataccttgattttaggtttggtttgggttgattggggttcgttggagttgttagagttttggtgatttggtcaacgaatttgagtgcttcttcttttactttttgaagagctttagcagcaaccttaatcaggtatttgatgttttgtttgaggtgttgttgacgaccaggatcagtgttaactggttgagggcgttcattgttgtttagtaatgattgttcgacttgatgtgatggatcgttttgggcaattgaatcgacaagttggtttttgtaggagttaatgttatcttgaatggcttggttagatgttgttaattgatcattttgggtttgcaggtctttattgtcattaataagcttagtgtgtttggtttgatctgtttgccattgttgccgttgatcattgcgccattggtcgatggaggcttcaacatcgttgatattgtctgcggttattggttcattatcaccgtacattaggttattacggtcaaattcctgttgagcttccttaacgcgctgtaatttgcgttgctttaattgttcgtcagcatcgttaatttggttttgtaaagtttgtagttgttgtcgctgttgatttagtagctgttcttgttgttcttgctgctgtttggcagctttttctttttcttgagtagctaccatgtctttatctgcttgttctttattgctttgagaggccctagcagcgtgtgtaatgccatttgccatttctaagggtgttagatcatttccgtccttatcaactgcctggtggcctgtggtggcctcatagatggctttgagattcttagtaacagtttcaacctgatgtttgacattattattctgattggtaaggtcgttagtttgcttttgcagtgattggatagcttctttgtgttcagcaatttcttggtgttgagcttttagttgttccattgaaagtccggtttgaagcgatttgtcagtctcagttttacgttcaaactcaagaatttttttattttgggggactttataagttttatgcagctcggtttccaagcatttaagggcaaatttatctatgctagcccggtaccatttggtagctgctcggcctgagcaatattgacctgttaccgcatggtgtaggctgactaatgcttgattgagtgagttagtcgcatgggcaggtcgctttttaccgccacgtgtcatgccaaaggttgctatctcgtaatggatatgtgagattcccatttcatcgttgttagtagcatagcggccgcgatgtaaataatcgccaatatttactcgttttcctgatttgagattccaaccaacattgttattagtagcagtaattaaagtgcgattgaagcaatcgtaaaatcgtttagcgacagcaatgttatttttaatcggctgctcgtgttcgtcttttagcttaaaaacaagatgagtagttccatcgggaagcttttcctctacgtacgaagaagccgggcaaaactctttcatcaattgactttgaacttccatattgccaatggtcaaaactgcagtagcttttttcttcctcttgagaaagttttttacacttccgtattgtcgttcagcatgacctttttctcgttgatgttggtcgtgctgttccacgtagttatggaagtgttgctcattccaatcgtcaatagcttgacgggtggcagttgattcatcatatacgttaaattgagtttcactgaatacaatatccttgtttgaatggttaatactctggtcatgttccacgtgcttttgaataccagaataaccattagtatcttttgcctgtaagtctgttgttactgtacatttcaatgccattatttcatcaccagcgttcatagttttacattttaattgtagcacgttcagtaatgagtaaagtggataacttatccaatttactagctccctagtcaaaatggagtaatcccattttgtcggtcgctcttccgagggaattaggaacacatttcctaataaccattgatttaattttcaagattgtatttgaaaattaaatattaccttttaatcaaaaggtaataccaaaataaaaaattcccaatgtctttcgacaaagggaattttttacaatccagctttaacatttagttaatctggattgttcccattgggaaattcattatcatgtaatggattctttcccaatggttttgcgtgactttgttcctgctgctcttgttttattttagccacaaatgcagtcacaaaatcatgcaaatcttttttcgcaaatggcttttgatcatcaccaatttgcgaatcaataatgctgtttaagcgttgcattaagtcatcattattgctggccgaagttagcatagcttcggccaattccgctttccattttagttcgtttaaggctaaaacatcagcgttatgtttcatctggagcttcttatactccatatcttcaggaacagtacgaccactcagttttttggctttaagttcttgccaacgggcaattgatttaggggacatcatgataaaaacttctttctattaagtaattagattaactattatgagaagttaacagtcaatctcttgcccaaagcgttagcaattttggttaaagtatcaatactggtgttggcgccgctttcaattcgtgcaattgttgattgaggaacatcagaaacagtagctagatctcgttgagaaaggcctgattcttttctaaccttagttaatgcaatggcactctctaacttagttgtttcgttttcaaattcctttttaaattccggatcctttaattgttcatttaagtagtctttaaaattaatgttgctcataattattgctcctttcggttggcaaagtattcgtcacgtaatttcttagcatgattaatttctcgtggcggtgttttctgggttttcttagtaaagccatgggtaataacgtagtgaacgccatcaacgtgaaaataaaggccacgttgttgattattactaacccgagagcgaatttcatagaggttcttctccagtggcttaacccagttatgttgaattccagcactaagtccataagttgcgaccatgttaatccgtgctaataactttgctttagctttaacgtcaagactatctaaatattctgcaaattcagtatggccattagggcgagtataaaattcaaattctaaatcttccatgccctaatgatagcatatattgtattaattatcaatatatgctatctagaacaactaccgtgcttcgcttgctggactcgttaatcagaacggtttatgactaaacctaacctgattaacgagtgaatttttttgggggggagtgcttaatcgaacttaacttcatcgagcatttgttctcggctgacttgatccagacctaaatattttaaggtcatggcttctgaggaatgattaagcagcgacatcactggggggagtgcttaatcgaacttaacttcatcgagcatttgttctcggctgacttgatccagacctaaatattttaaggtcatggcttctgaggaatgattaagcagcgacatcactaaaccgatattgtaatgagtttgtgtgtagacccggtaagccccagtttttctcattgtgtgagtaccgaggtagttaatcccaagtaaatcgccagttttagccatgattttgtaaaactgtttttcagtgatgtgccgatcggggtgtttagtcgatggaaaaagccaatctgagtggagattttgttggtttagccactgaaaatagtcttttaggtcttgtttaactggttttaggtacaaagtattgggctttccggtctttttatcccgaatataagcatttttagcgatagtcccatcgttattgaagatctcattgcgtctgagagctaataaatcggacactcggagtaacgttgccttgccaacttggaaaattgtgtaatttcggcggccagctttaaaattatgtaggagagtatcttcgacttcatgcaggatattggaatctttgatgggtaaaacgagttgtttcatgattaattgctccttatttaggggctactttttgtatatataaattaaaagcccctatattctgattgtagaatacaggggcttgacatatcaacattctataggggctatttatcacaaatagaccctattatgaactggtttcagtcaatcttttttattaatctttcaatttgataataattaattgttattacgaataagtcttacagcaataatcaaaagaaatgggattaaagttagcacaaaactaacggtaaatatacttaaatttttgatggtatctttagattgggtcatgaagtccgtcctaacttattggttttgtcacttataagtttaaggcttcatggcctttttggtctagttatttaggtgttgcacttacattgtaaatccggcgtcacaaaaaaattgactgacgagtcaataattcgttgactcgtcagtcaatcgcgactatactggaaaaggttgatcagataccgacatattaaaacgtgtttcaagtttgaccttaaggaggatgacaaaaatgacaacagctattatcgaacttgaccatcttcaaaaaaactttggcaagtttgccgcattaaaagatgtcagtttcacgttggcacccggtcaggttctgggttttctaggacctaatggggccggcaaatccacgaccattcgagttattttaggcttattaaaaaagagtggcggctcagtgaccgtcttcggcaaagatgcctggcgggatgatgcggcgattcatccacgcatcgcctatgttcctggggacgtttatttatggccaaatctttctggcggcgaaattatcgacctattgctacgtttaaatggccgccagcataatcaaaagaccgatgaactaatcaaggcctttgaatttgatccgaagaaaaaagctcgtacctattcaaaaggcaatcgtcaaaaagtagcgttaattgctgcgttttcgcaagatgccgatttgtatatttttgatgaacccacttctgggcttgatccattaaatgaacagactttccagcaagaagttttaaaactgaaaagagccggtaaaagtgtgctgctatcaagccacattttgtccgaagtcgagcgaatgtgtgattcaattgttatcatccgtgatggtagtgtgattgagagcggcaatcttgatcaattacggcatctatcgcggatcaaaattgaagtcaccaccgctaccccaatgactgctttggcaaagcaagctggcgttcacgacctcacttatcgcgattccgagcacaccaaggcggttttcaccgctgatcgagacgcgcttggcaccatcatgaccacactggccgccaacaccgtggtcgacatgcaatcaacgccgccaacgctggaagagttattcctgcgttattatggaaagcaaggtgagactcatgcggcacagtaatcggaacgcaggttatctgcttcgggcaaacctcaaacaaaatctaaaattttcactcatctggcttgtcattttgatcatgatgattgccagtggtgctggcaaattggaagcagactttgcaggcggggcctcgggctctaaagagattgtcaaaatgctgcaagcgccgggcatggcggcaatgtttggcgcgatgccaaaggtggacacgtataacacagcgattgtgtttgctggtgtgatggtcgtcttcatgattattttgcaggccttatgggttatgccgctgatgattcgcaacacccgcggtcaagaagaaagtggcttgctcgaaatggttcgcgctcgcaatgttgggcgaacggctgccatcaccgccgcttcgcttgagcttctcatcgacagtgccataatgggtatcctctattttgtctcgttggccgctgtcaacatgggtggtactgacttgtacggtgacttcctgttttcactggggatggtgatcgccaacttgctattcggagccattgcgttgctattcgcgcaactaaccaataacacacgtacagccaatatgttgagctacatggtgctgactgccgcttatttggttcggctggtcaccgatatccagcatcaaaatctgacgtggttatcaccaattggttggttcgaaaaagcaaacttctatactgataacaacgtctgggctttaggtttggccttactggtcagcattctgcttgcggccagcgccaccatgattgcccgcaaccgcgatctgggcgccgggattattgctgaacgcaccggccgagccaaagctgccggctggcttcgctcgatccctgccttactgtggcgaactgagcgcggattatttgctgggtggttaatcggcgccgtggtgtttggcggcgtcatgggtagtgtgctcggcggcgttggcgacattcttaaaacgaatccgctttatcgtaaaatactagatgttggccaaatcaacgctgccaatcagaccatggtcctgtcattcttaggcatgtatctcggcattttcgtcgcattagccgtgactgctggcgtccaagtggcattccgactcaaacgcgatgacaaccttggttacttgagcgtcattcatgccgaaaagccaacgcgaaccacgatcagtgtcagctactattgctttggtctgctggcaggcgtgttcgtcctttctgctgggctgctggccttgttcttcactgggaacactgttctcagtcacccgttgccgctcaagtacctcggtcgcctattcgtggctagcgttccggctgtgatatcgtttatcgcccttggcatcgcactagtcggtctgtggccacgcttaagcagtctattctggctgtatatgggagccggtctgatcgttcaaattttccggggattgtttgatttgccaaaacacgcaggcaacttcacaccttttggctggattgccaatgtaccggttgaaaacgttgatcaaacatggctaatcgtgatggttgttagcgctatagtattatttattcttggcattgctggttatcgccgtcaggatttgagcctatgaaaaatgttgtgacagatcctgaaaaggtcacccgaatcctcaaaacagcgacggaaattttcggccagcaaggcttcatcaagagcaaaaccgatcagattgccaaccaagcacaagtatctaagggcttgctcttccattattttggcaataaacaagcgctgtatcttgacgctttcaaatatgcctatcatcgaatttatgatcacatggaccctaaaaagtggcagaatgcccctggcttggctgccatgatgaccactgcagttaagtatgagttgaaactacaattcaaattcccagctgaataccgcttgattatgcaagcctatgctgatttaccgcattttcccgaaccgttgcgacaacaagtgcagcaagaaacaactgccatatccgctgaaatcgatcgcatttttcgcgagaaaattgaacagctgcctcgtcgtgagggcctgtcagtcgatgacgttttcggtgtcgtttctgccttaatcgcccaacaaacggcggtcaccatcagactcattgccagtggccattatcgcaagtttgaagatctgcagtccgtggttgagacgatagcacgccagttattgattgtcgaacacggctttttaccagatgaaagttgacgtcagctgatagatcaaaaaaggtcattagggtataccctagtggccgtttttatttctgtgctatactaggaattacaatcgttcattagaactgtccaaaaggagaattggaaatggctaaaatcggttatgcgcgtgtgagttccaaggagcaacatttagatcgacagttagcggctttaaaagacgttgataaattatttacggataaattaagtggggctaacactaatcggccagaactgcaaaaaatgctggcctatattcgtgagggtgatattgtaatggtcactgaattagatcgcttaggcagaaacaaccatgatttgactaagatcatgaactccattcaaaataagggtgccaccctagatgtgttaaatttgccgtccatgacagggattgctgacccaaatttacgtcaactgatgaccaacttgattattgaactctataagtatcaggccgaaagtgaacgtaagcgaatcattgagcgccagcaacaagggattgccttagctaagcagcagggtaaatatcatgggcgcaaaccccaatatgccaaagatgatccccgtttgcaacatgcttttaagctttatcgagctggcatgagtgacattgatgtgtcccgaaatacaggtattaaacggacgacctttattcgataccgtgtgaaatacggtattaaaagaaaatagggcgcccttttggttagcacatgttaactgaaagggtccctattttctttacttaaaaggtagattgatgaa

SEQ ID NO: 55 - DNA, 4653 bp, synthetic construct
  misc_feature 1..4653: note = Based on Lactobacillus reuteri
  source 1..4653: mol_type = other DNA
ttggcaatctttcacctatcagcaaaaatcattagtcgaggaaaagggcaatcagcaattgcctcggctgcttatcgttcagggaacaaacttcacgatgaacgatacgacgaaacacaagattacacaaacaaacgtttcatcgaacactcagaaatccaacttccagagaatgccccagctaagtatcaagatagggcaaccctttggaacagcgtagaaaaggcagaaaaagctaagaattcgcagttagctagagaaattgaaatagccttaccacgagagctaacaccagaacaacgagttaaattagtccacgattacgttcagaaaacctttgtcgataagggaatggtagccgattggtctattcacaacccacaaccagataaggataatccagaaaagccagcaaacccgcacgctcatatcatgctcacactgcgtagcttgcgttctaacggctcttgggcaccaaagaagacaagtcactatgaactagacgaaaacggccagaaggtgcctgtaatcgatcctgagacaggcaaacagaagttaggggcgaaaaaccaaaaaatctggaaacgagtaattaccccaactaatgactggaataaccccaaaaacgttgaaaaatggcgggctgaatgggcgaagacttgtaataagtacttggctcctgaccaccagattgaccaccgcagttataaacggcagggcaaaaaacaaattccaacaatccatgagggctatgttgctcgtaaaatggaacgagaagccacaggaagctcagagagggcttcttttaaccaaatcgtaaaatatatcaacaacgagttaaaatcgcttagaaagcaaattaggggcattatacgcgaaatacggaatctagaaaaaggacgtgaccaagatgagaaagttcgacttcagcaagacacccgagcaaatcaaacaagaacaagcagagatcaagcgctgggaggaggagttcaacgcacgattacagacaatcgggagcaatccggaaacggtagagccaacggaactgccgaagaagcccaacgaacagatcctaatcaacttcatcaacagtctttcggagaaacagcaagaagaattttccgagatttccggctatttgcggagcgtcaacgagaagctcgacagcgacaacgccgacttagccaaggcttacaacatcatcaagaaacagaaaaacgacttgaagcagggcaacaacaacttactcgaacaaaacatacagctgacgaacgaaaacaacagcttacagaacgacaaattcgagttagaaaagcttttagcgacgcttctaagtccaaagtcttggaacgatactacactcacttccgtcaaacaaaaactcaagcaaatcatgcaaaaggattagactaccaaggaccaattctgggacattcccgaggacgctcaaggtagttatgctagaatgattaagccgtccgtggcaactcctacgtaaaggaggtggcaacatggcacatatactcctctcagcagttttgagccttctgggttccttgataactgcactgttcgctgattggcttcgtcggcgaaaatagtttttgacggcatgaagcgcaaattaaaagccactcaactattcgcactagttgggtggcttttttgcaacgtggcaatatacttctctcggttaaattataacatggttgttccagaagtgcattaggtaggcggtttgtccccccccatgggttttggcttcgaaaatcaatcgttgaagtgaccagcgaagctcagctgatggagccctcatattcaagaagcaggtcaacgaatgccaattccaacatgagggccatgacttaggccactgatactcgcaaatgactgtcacaccaacggtattagccattctgataagcgagtctaacgacttttgacgcataatcgaccacctaccttattttcaaagcgcctcagagctaattagagtattcttcaaggagcttagcgaggattatagacgcttggcggacttcactttcggcttgattgacccgtttagcgatcttgtcatcatggcgagccaccttttccaagtcatggagattatcagcgatttggtcagtcatgacggagtagttcttaatacccgacagcaggctttcaacgttagtattctcaaggttttcgttgaatatcatggttattcctccttatcctcaaacttagtcatcttctgtctcctgttttagagaattttcaatcatgtctaataatgttgacatgtcaatgttaaatgaatcaaggctaccataccgcttgatttgagttttaacactatccaatccatattcttcaagtaatgcttttaatttaccagtaactttttcacctaaatgcccaaaatactgaagccagctcttaagtaattctcggtactggtcaaatttttctttttcagtaagctgtttctcaacttcttcttggtcctcagaaccgttaactactttccagaggtcagggtcagtagtacccaacttataaccaagtacccgatcatatgctctggccttttcctttggagtcaaatcaggattaaggtcaatattatctagcttcatacgttggtcagcataacgacctttttcaaagtcatcggcattcttggcttcaggttgccaagtgaactcatagccaacaacaggacgtcctctaccagctcctcgaatagtttttacggttaagccacgaataacaggggttagctcttctttaattggacgtaacactctttttcttacgttaccctggtctttcttgtagctcttgggtagatctagttgcttaaataattcgtcactggttaacttcaaccgccctactgttcgatattgtttaattaacactctttttcttacgttaccctggtctttcttgtagctcttgggtagatctagttgcttaaataattcgtcactggttaacttcaaccgccctactgttcgatattgtttaatcaagcgaaacatgttcttagcataagcagattgaagactattaaactgagctagttgaaatcttgtccaatgacttaaatcattgaatagcttctgaaatagagggttaacttgaacagtcagaatctgtttactcctctgaatctgaaatacattccaacaagcaaattgagtaatggtgtctccatcatcggtgtaggcattaatctctaatagctttttattagttttcatcaaatcttttacaaaattagatgtactccgttcatacttactaagactttgtagttgcgtaaatgaaaactttaatttctgagtacccttttgatacgactgctgaactagtgtaataaatagatttagctcattagagttcagtcggccaagtggaatagtattaagccgattactatacttcacaatttcattactcaattttctcacctcaaatatattataacattttatcgtacacaatcaagagtacgtacttatagcacacgtacagtattagcgcgtatattaagacaaaaatttagacaaaatgtaccttataacggacaaaatgtaccttataaaccggacaaaatgtaccttataacggacaaaatgtaccttataaaaaacgaaactcttactctcccaaggagtttcaaacccctaaagagtatttaaagaatatatataaagatatttaaagaggcaccatacggaaaatctcctttctgatttcaatttcagagaggagattatcactaaatttcaaaattcaatttttcgccaaaaacttttttagtagttttcggtaactagcaaaatcaacttcgttgattattttgactatttcgaaattcatcaaaaactgaatgcccgtctttatagtgaatttgtttagtgaagttcactaactgcttcagcatattcagttgaccacgtaaccattgttcactatcagcaggactaatttgttctgataattgctctttttggtggttataagccttataagcctgatatttagcataaccttgtgggtcatctgatttagccactctagccactttaggtacttttctaagccccttagcttgagcttgaatatcttctaaaaccgcccctttttcgatgagacgcttatttcgttgctttctcttttcagtattgatgcgagccatttgacgctctcgacgagccttaaacactgcttccttttcttgaaggcgttcaagttctgctttcattttttcaatatcagccataacaaatcctcctaatgtgaataatgttttctgaaattcaaatgttatctagattatatgatgttacaattgatttaaccactacgtttggtctccctgttaagggcgcacttatacacattcaaagaatgtaattacgcctgacggcgacgtgcgctctccgaggggacttacccagtcggggcgacttcatcgagaccatgtcatggagattcagtttcaccgaaacggaccactaaccccgtggaggggagaagtttcacttctagggaccattccatggagggtcgctttttacaaaagcaacgcaaaacaaaagactagctcccaagcttacgcaaggtcgttagtccctaaggaggcagcacaga

SEQ ID NO: 56 - DNA, 20 bp, Lactobacillus reuteri
  misc_feature 1..20: note = Description of sequence: 16S rRNA sequencing primer
  source 1..20: mol_type = other DNA
agagtttgatcctggctcag

SEQ ID NO: 57 - DNA, 23 bp, Lactobacillus reuteri
  misc_feature 1..23: note = Description of sequence: 16S rRNA sequencing primer
  source 1..23: mol_type = other DNA
cttgtgcgggcccccgtcaattc

SEQ ID NO: 58 - protein, 639 aa, Lactobacillus reuteri
  REGION 1..639: note = Description of sequence: tetW protein
MKIINIGILAHVDAGKTTLTESLLYASGAISEPGSVKKGTTRTDTMFLERQRGITIQAAVTSFQWHRCKVNIVDTPGHMDFLAEVYRSLAVLDGAILVISAKDGVQAQTRILFHALRKMNIPTVIFINKIDQAGVDLQSVVQSVRDKLSADIIIKQTVSLSPEIVLEENTDIEAWDAVIENNDKLLEKYIAGEPISREKLVREEQRRVQDASLFPVYYGSAKKGLGIQPLMDAVTGLFQPIGEQGSAALCGSVFKVEYTDCGQRRVYLRLYSGTLRLRDTVALAGREKLKITEMRIPSKGEIVRTDTAYPGEIVILPSDSVRLNDVLGDPTRLPRKRWREDPLPMLRTSIAPKTAAQRERLLDALTQLADTDPLLRCEVDSITHEIILSFLGRVQLEVVSALLSEKYKLETVVKEPTVIYKERPLKAASHTIHIEVPPNPFWASIGLSVTPLPLGSGVQYESRVSLGYLNQSFQNAVRDGIRYGLEQGLFGWNVTDCKICFEYGLYYSPVSTPADFRSLAPIVLEQALKESGTQLLEPYLSFTLYAPREYLSRAYHDAPKYCATIETVQVKKDEVVFTGEIPARCIQAYRTDLAFYTNGQSVCLTELKGYQAADGKPVIQPRRPNSRLDKVRYMFQKIM

SEQ ID NO: 59 - DNA, 1011 bp, Lactobacillus reuteri
  misc_feature 1..1011: note = Description of sequence: PTA-126787 (Strain 3630) tetW sequence along with flanking gene sequences
  source 1..1011: mol_type = genomic DNA
ttaagcttcttcgccgccaaccttaacaacagcttttgaaaccttacctaatttaccactaacaaagtcttcaacaccatcaaggtctaattcgtgtgagaagagtggtagtgggtcaacaacaccagaagaaagaagtgcaattgagtcttcaaaagtgtaagggttaatgaaggccccttgaattgtaagttgtttttggaatacatcgtaagtgtttactgagaacttgtcatcagggttaccaacaccaaacattaatacttgagcaccacgagctgcagctgcaagtgcttgttcttgagtagctggcaaaccaaccgcttcaacaacgatgtcatatgcatcagcaggaatttcttccttagtagtgttgatagtcttaacgccgaagtgcttccggttgttttccaacttttcatctgaacgaccagctaaagtaacttcgtgaataccacgagccttcaagatttgtgcaaataattgaccttcaaaaccatcacctaatactaaagccttttggtatgggtgagtttcaagtaagtcaacaccgtgcattgcacatgaaattggttcaacaacggcagctgcctttaatgaaacatcatcaggaattgggtaaacaacttttgcaggagcagtaaagtattcttcaaaaccaccgttacgggtaacaccaacagcatcaaggtgttcacataattctgggcgttgagtccgacaatacttacattgaccacagtagatgttagggtcaacggttacacgatcacctggcttaacgttagtaacttctgaaccaacttttgtaactacccctgagttttcatgacctaaaacgataggaggaacagctgatgcagatcccggaagaccggcatagagcgctttatcagtaccacaaataccagcgtaggcagtatgaattaagacttcatcaggcttaatttcaggttctttaatatcttcaatttcgagttgttttttacctgttaaaacaagtgccttcat

SEQ ID NO: 60 - DNA, 570 bp, Lactobacillus reuteri
  misc_feature 1..570: note = Description of sequence: Intervening sequnece
  source 1..570: mol_type = genomic DNA
aattaaaatacctctcttgtgaattttatcatttgtcaagtgatagtatagtgtgaaaacgccttaattgtcaaacgtccaacaattatctcacattcttttcgccatcataaaacgttaaactcagcaaatccgaacctaaataaatcccggtatagaagcattttctaaaaaagtgcaatttttaaatatttttttcttcactaagtttatgctatttttttgttatcacataaatggttttactttcattttttaaattacataatttcacaaggctttttatcctatttagcgttttacatcaagaaataaaatgtttctacatataaagtaataaattctaaatttatatagaaaatttctccaactttcagaaagcgcttaactaccattaggcacgccaaaacttatctccaaccgctcctcaaaatcgcccaaatggccgttataacggctattttccattgcaggatatatttttttatgttaccctaacaaagtattcgaacttagttaattatgatttccaatctaattaacaaaactcaaacgaaaggtggatttggc

SEQ ID NO: 61 - DNA, 1593 bp, Lactobacillus reuteri
  misc_feature 1..1593: note = Description of sequence: mntH CDS
  source 1..1593: mol_type = genomic DNA
gtggacgacacaaagaatcaacaccggaagcataaacttattgaatatgctaacggtaaatcactagaggaaatcaacggaacagttgaagttcctcgtggaaaaggcttctggcgaacattattcgcttactctggtcccggtgcattagttgctgtgggttacatggatccaggtaactggtcaacttcaattactggtggacagagtttccaatataccttaatgactactatcttgatttcaagtttgattgcgatgttgcttcaatacatggcggctaaactcggaatcgtgagccaaatggaccttgctcaggcaacacgggcacgtaccggtaaagcattaggtattatcttatggattatgactgagttggcgattatggctactgatatcgctgaagttatcggggctgctattgctttaaacttactgttccacattccgttgatcccatctgtatttattactgttcttgatgttttagtactgctattattaaccaagatcggattccggaagattgaagcaattgttgcatgtttgatcttggtaatcttgtttgtttttgcttaccaagttgccttatctaaccctaactggggtggcgtatttatgggtctccttccatcagctaaggcaattgcccaacatccagaaattagtggtattactccattaactggatcattaggtattatcggtgcgactgttatgcctcacaacctatatctccactcagcaatttctcaaactcggaagattgaccacaatgatcttgatagcattcgtcaaactgttcgttttactacttgggattcaaatatccaattatccttagcatttattgttaacgcccttcttttaatcatgggggttgctgttttcaagactggtgctgttcaagatagttctttcttcggtttatatgatgccctgaataacacttctatgcttagtaatccaatcttaattgcggttgctaaatctggtgtattgtcaactttatttgcagttgctttacttgcctctggtcaaaattcaactattactggaacattaaccggtcaagttatcatggaaggtttcattcatatgcggatgcctttatgggcacgacggttagttacccggattatttccgttattccagttattgcttgtgttgctatgacgagtggtgagaataccatccaacaacacaccgccttgaaccttttaatggaaaattcacaggtattcttagcttttgcccttccattctcaatgttgccattattaatgatgactaacagtgaggttgaaatgggtgaatttaagaatagtggctgggttaaggcttgcggttggatctctgtaattgcccttaccttcttaaatctctacaaccttcctgcaacttatgaaggttttggtatttgggcaaaagggacatccgatgttctcgcatatatcacgattattgtcattcttgctcttcttatctggacttgtgttgaactctacaaaggggataagcgctttgctgctgaaggtaaaggattcggacaacgtgaagctcaaatgaaagattcagctgtagaagattaa

SEQ ID NO: 62 - DNA, 680 bp, Lactobacillus reuteri
  misc_feature 1..680: note = Description of sequence: Intervening sequence
  source 1..680: mol_type = genomic DNA
aataaaaacctggaagcaatgctcatgtacggtaaagaagcaagcaaccgaaaacaatagatagaccgccagcactacactattccgaaccaaagaccaaaagataagcattttgagaaaatctaaacttttggattttcctacaatgccgactacggcggaatccctcccactccttatatatttctttctgtatacattaaatttgtatttagtaaaatgcagacaacaccacggatcggcttttggctggacaattccaaccaaacaccgcagcagacagtagaaaccattctgaacgttaggaagccggtatgattgttacatataaggggaagaaaaatttcttttagatacttgttttcctaaaactgatgtgatataataattcaattccagaaaaggagtaaaaaatatgcggcaagttattcttaaataaaactataatcaaatagtgggaacaaaggattatgatagtcccttttgtaggggcttagttttttgtacccaatttaagaatacttttgccttatcaattttgacatatccccaaaaacagcactcacaaacaggtgtatgctgtatatgtgtatgtccgcaaattatcatccccagtggtaaaagtattttactgctggggatttttatgcccttcggggcagtaaagggaggacaatcac

SEQ ID NO: 63 - DNA, 1920 bp, Lactobacillus reuteri
  misc_feature 1..1920: note = Description of sequence: tetW CDS
  source 1..1920: mol_type = genomic DNA
atgaaaataatcaatattggaattcttgcccatgtagacgctggaaagacgaccttgacggagagcctgctatatgccagcggagccatttcagaaccggggagcgtcaaaaaagggacaacgaggacggacaccatgtttttggagcggcagcgtgggattaccattcaagcggcagtcacttccttccagtggcacagatgtaaagtcaacattgtggatacgcccggccacatggattttttggcggaggtgtaccgctctttggctgttttagatggggccatcttggtgatctccgctaaagatggcgtgcaggcccagacccgtattctgttccatgccctgcggaaaatgaacattcccaccgttatctttatcaacaagatcgaccaggctggcgttgatttgcagagcgtggttcagtctgttcgggataagctctccgccgatattatcatcaagcagacggtgtcgctgtccccggaaatagtcctggaggaaaataccgacatagaagcatgggatgcggtcatcgaaaataacgataaattattggaaaagtatatcgcaggagaaccaatcagccgggaaaaacttgtgcgggaggaacagcggcgggttcaagacgcctccctgttcccggtctattatggcagcgccaaaaagggccttggcattcaaccgttgatggatgcggtgacagggctgttccaaccgattggggaacaggggagcgccgccctatgcggcagcgttttcaaggtggagtatacagattgcggccagcggcgtgtctatctacggctatacagcggaacgctgcgcctgcgggatacggtggccctggccgggagagaaaagctgaaaatcacagagatgcgtattccatccaaaggggaaattgttcggacagacaccgcttatccgggtgaaattgttatccttcccagcgacagcgtgaggttaaacgatgtattaggggacccaacccggctccctcgtaaaaggtggcgtgaggaccccctccccatgctgcggacgtcgattgcgccgaaaacggcagcgcaaagagaacggctgctggacgctcttacgcaacttgcggatactgacccgcttttgcgctgcgaggtggattccatcacccatgagatcattctttcttttttgggccgggtgcagttggaggttgtttccgctttgctgtcggaaaaatacaagcttgaaacagtggtaaaggaacccaccgtcatttataaggagcggccgctcaaagcagccagccacaccatccatatcgaggtgccgcccaacccgttttgggcatccatcggactgtctgttacaccactcccgcttggctccggtgtacaatacgagagccgggtttcgctgggatacttgaaccagagttttcaaaacgctgtcagggatggtatccgttacgggctggagcagggcttgttcggctggaacgtaacggactgtaagatttgctttgaatacgggctttattacagtccggtcagcacgccggcggacttccgctcattggccccgattgtattggaacaggcattgaaggaatcagggacgcaactgctggaaccttatctctccttcaccctctatgcgccccgggaatatctttccagggcttatcatgatgcaccgaaatactgtgccaccatcgaaacggtccaggtaaaaaaggatgaagttgtctttactggcgagattcccgcccgctgtatacaggcataccgtactgatctggccttttacaccaacgggcagagcgtatgccttacagaactgaaagggtatcaggccgctgacggcaagccagtcatccagccccgccgtccaaacagccgcctggacaaggtgcgctatatgtttcagaagataatgtaa

SEQ ID NO: 64 - DNA, 248 bp, Lactobacillus reuteri
  misc_feature 1..248: note = Description of sequence: Intervening sequence
  source 1..248: mol_type = genomic DNA
ctgcttccagttttttatttttgtaacgattctttcacaaaatgttcatacttgaacggtatagtatagacaatccctaatataaataaacccctatttttcttctatactatccccctcaaaatagctatgaagaaatacgaaaagtggtcggcccataatgagtcggccattttttaatacatctaggctcaccatggtataataaggaactagatatattactcattaagtatgaggtgaaatca

SEQ ID NO: 65 - DNA, 684 bp, Lactobacillus reuteri
  misc_feature 1..684: note = Description of sequence: Hypothetical protein coding sequence CDS
  source 1..684: mol_type = genomic DNA
ttgaataataaagataataatcaaaataataataagcggcgacctactcgggttgagctttatgacactcctaagccaggaaaagaaaagaaaaaacgttctttctttaatcgtcagcctaaacagactacccctaaccataaacataagacagcatcccctaacaagaaaaagaatccatatggaatttcacgtcggatgttcaaggtcattttaggctgcctattagttatcttaattgcaaccattgttattttcttagttaaacaacaggaccctgtcaatgttgatagcaatgacactactgtctccacaagcacttcatcacgcaagaagcataaaaagagcagcagtagcagtcataagcatcgttcaagttccaatgacagtgatgacaatgatactcaagatacttatagtatttcaactcctagtcgttcggataacacgcctcaatcaagtcatccaactaaccaacaaccaactactaactcttcttcaactccacaacaaaaccaaccatcgcaggaagaacaccatgatcaaggcaacagccaacaacaatctacttcacaaccagcaagcagcaattctgggtcacagcctaatcaaagttcgcaaagtactagttcccagtcaaacccgcaaccagttcaacctcattctcaaaataatcagcattaa

SEQ ID NO: 66 - DNA, 328 bp, Lactobacillus reuteri
  misc_feature 1..328: note = Description of sequence: Intervening sequence
  source 1..328: mol_type = genomic DNA
tttggaataaaggggttgtcaattaaagtgggcgtgctataatcaagacaatcgattgaaggatatgcaccttcaaagtcctctacagagagtaagtgccttgagtggaagcacttgtgagtgacaatgatggttgtaccaccttcccttattattagccgagataaggctagtcggatcgtgtccgttaccgcaccttagagaggacattactagtgtgtcctaaagatgggtggaaccacgctaatttttgttaattgacgtccctgatactttcaacattgaaagtatcagggacgtttttatttatattaaaggagagatttct

SEQ ID NO: 67 - DNA, 1806 bp, Lactobacillus reuteri
  misc_feature 1..1806: note = Description of sequence: thrS CDS
  source 1..1806: mol_type = genomic DNA
atggctcaggttgctgttatgtccccagatggatcagttaagaagatcgatcgggattcacaagaaagtttagaagcattacgtaagctttctgcattaatgttaaaggctgcattaaaacaagaatttaagggtattcgacttggtgaagctgtcgctgacgaagatggtttccacgttgattctgataaagataatcaacaagtttctgccgacgaattaccagctcttgaagacgtaatcaagggaatggcaaagaacgatgttaaggtagaatttgttgaagtacctgtagaggaagcacttgccgaagtaaaagatgatcgtttctcaactgaattgatcaatgaaaatgctaaagacggcaaagtagcaatgtaccaacttggtgatgtcaaagctgttgcagatgatgacattcttttatatggtaacgttgttaaaaacttacgccttctttctgttgctggtgcttactggaaaggtatgtcttcaaatccaatgcttcaacggatttacggaactgtcttctacaagaaggacgcattagaagaagacttaaagaaacgtcaagaagctaaggaacgtgaccaccgtgttatcggtaaccaactcgacctcttctttgttgatcctaaggttggtgccggtttaccatactggttaccaaaaggtgctactattcgccggacaatcgaacgttacatcattgaccgggaagttgccgatggttaccaacacgtttatactccagtcctaatgaatcttgatgcctacaagacttctggtcactgggaacactaccgcgacgatatgttcccaccaatggacatgggtgatggcgaaatgcttgaattacggccaatgaactgcccaagccatattcaagtttacaagcaccatattcgttcataccgtgatctcccattacgaattgctgaacttggtatgatgcaccgttatgaaaaatcaggtgctctttctggtcttcaacgtgttcgtgaaatgactttgaacgatggccacactttcgttacccttgaccaaattcgttctgaattcgcaaagattttgaagttgatcatgagcgtttacgaagactttgatattactgactacagcttccgtctttctcttcgtgaccctaagaacgttaagaagtactatgctaatgacgaaatgtgggaaaaatcccaatcaatgttgaaatcagcaatggacgatcttaaccttgattattatgaagctgaaggtgaagctgccttctatggtccaaaacttgatattcaaactaagactgctcttgggaatgacgaaacaatgtcaactattcaacttgactttatgcttccagaacgattcggactttcctacgttggtcaagacggtaaagaacatcaaccagttatgattcaccgtggtgttgttggaacaatggaacggttcatggcttacttaacagaaatttacaagggtgcattcccaacttggttagccccagaacaagtccacattatccctgttaacgaagaagcccatggtgaatacgcagataacctcgctaagaagatgaaggctgctaacattcgggttaatgttgaccaccgaaatgaaaagatgggctacaagattcgtgaagctcaaacacaaaaggttccatacactcttgttgttggagacgatgaaaagaataacaatggtgtatctgttcgtaagtacggtgaaaaggaacaaaatgaaatgagtcaagaagcatttatgaatgaaattcttgaagatattgcttcttactcccgtgaaaagtaa

SEQ ID NO: 68 - DNA, 1011 bp, Lactobacillus reuteri; identical to SEQ ID NO: 59
  misc_feature 1..1011: note = Description of sequence: tdh CDS
  source 1..1011: mol_type = genomic DNA

SEQ ID NO: 69 - DNA, 570 bp, Lactobacillus reuteri; identical to SEQ ID NO: 60
  misc_feature 1..570: note = Description of sequence: Intervening sequence
  source 1..570: mol_type = genomic DNA

SEQ ID NO: 70 - DNA, 1593 bp, Lactobacillus reuteri; identical to SEQ ID NO: 61
  misc_feature 1..1593: note = Description of sequence: mntH CDS
  source 1..1593: mol_type = genomic DNA

SEQ ID NO: 71 - DNA, 680 bp, Lactobacillus reuteri; identical to SEQ ID NO: 62
  misc_feature 1..680: note = Description of sequence: Intervening sequence
  source 1..680: mol_type = genomic DNA

SEQ ID NO: 72 - DNA, 1920 bp, Lactobacillus reuteri; identical to SEQ ID NO: 63
  misc_feature 1..1920: note = Description of sequence: tetW CDS
  source 1..1920: mol_type = genomic DNA

SEQ ID NO: 73 - DNA, 248 bp, Lactobacillus reuteri; identical to SEQ ID NO: 64
  misc_feature 1..248: note = Description of sequence: Intervening sequence
  source 1..248: mol_type = genomic DNA

SEQ ID NO: 74 - DNA, 684 bp, Lactobacillus reuteri; identical to SEQ ID NO: 65
  misc_feature 1..684: note = Description of sequence: hypothetical protein CDS
  source 1..684: mol_type = genomic DNA

SEQ ID NO: 75 - DNA, 328 bp, Lactobacillus reuteri; identical to SEQ ID NO: 66
  misc_feature 1..328: note = Description of sequence: Intervening sequence
  source 1..328: mol_type = genomic DNA

SEQ ID NO: 76 - DNA, 1806 bp, Lactobacillus reuteri; identical to SEQ ID NO: 67
  misc_feature 1..1806: note = Description of sequence: thrS CDS
  source 1..1806: mol_type = genomic DNA

SEQ ID NO: 77 - DNA, 12969 bp, Lactobacillus reuteri
  misc_feature 1..12969: note = Description of sequence: PKS cluster sequence
  source 1..12969: mol_type = genomic DNA
gcaagaatttatcccatagtttgcgagaaatccttttagaagagcttgcctaataatagcggctcaatataatttaaatttaaaaccacctaattagcaatcgtaaaattgttaattaggtggttttagtatagaaataacccctaaattcagaatactagaaaatctagtactattattttttccttttcgggaataatagacatgaaagacaagaaaagataagaaatggtaaggaaactttgtacagtttaataaaagcagttgagtattgactattggcgtaagttttgatttttttaattgtaatattaatagaattatttaatctatgaaatactaatttcacatttgcttttgtatgtgaataaatctctttttcttggatcttagagggttcgtaaggtaaggaattaatttgtttagtatattctttatccgtagtttctttaattaatttcttcgaaaaatgctttgatggtgttcgagagtttgaattgttgtttaagcttttaatagagttatctcttattttatttttttgatatttaggaatatttaagttattgacctgctgattgatgtaactaatagaattatgctttgcggtatttaaattcccatatagtccagttagaaatattgctacagctaaggaaacccctacttgtcttaaaacacctgcaacactttgtgaagcggttaagagataaccttcaaagtttgatgctgctaaaactgttattggacctgcaataatcccatacccagttcctaaaataatacaagtaaaaataattaaggtaatattatccatatcaatatgtgtaaataaatagtaagagatacccattaatagaaaaccagataagataatggctcgagatcctaatttgtctaagagaattgcagaaagtggtgacatgataaaaatcattcctgtaataggcgtgataagaagtgcagcttctaattcggttctatgttgtatatgggtaaaatatgttggtaaaattactgtaacagccaccagaaataaattacttaaaattatagaaacggcagagccggtaaattctctattcttaaataaaacaagaggaatcattggtgctttagcataatgctcagtaattaagaatagtatgaaagttaaaatgaaaatgaaaaacagaaggttgattgcaggacttttccacccccagcttcttccttgagtcaatattagagttaaagctgaaagtaaaattatacctaaaagggaacctaaataatcatttccttcatttgactttggttcgtgaaagttgaaagtagataaacaaataactagtgaaagtatagtaaaaggtatattaacgctaaatatagaatgccagcccataaattgagttagaatacctccgattgaaggaccaagagcagcagctaaaccttgagtgattcctaatgcggcaataactttttttcttgtctttactgtaacgatatttattccaatagtcattgaaagtggaaaaagaattgcggctcctaatgattgaatgccacggccaagaattaaaatagctaggttaggacttataccagaaatacttgatccaataagaaacataattaacccaattatatataagaaattcatacctaatttttctgcaagtttagatagtgggatcgttaaactagcaaaaagtatagtatatatgtttaatgcccaagacaaattagttagagtgacgtgaagttcgttttgaatagctggcaatgcaatattcataacagttgtatctaacatacataagaaaatactaatacacattgcaattattattagaaatttgttttttcttttggtcatacttgtttcctcactttgtttatattaacaatgttaatataaacaaaagaaaaataaatgtcaacaatattatcattgtaaatatgaacaatatgtattaatataaataaaaattagtgaggtgattttatgacagctgtaatagttggaattggtattactagttcctgtggagagtcctttacagaaattgaacaaaatgtaggtaaaggaaaaacaggtatttctaatatcgattattttgatacatctgagttaacatgtggaattgctggtaacttatcaaagaaaatatggaaagaggttttgcaaattgctgataaaaatgaattagattggagtagtagtctttcaatttatactattcagcgattacttgaatcgtataatatttcaaaaaaacaaagaattggtttatctcttggaacatgtaatgggggaattcattctttagcagaatatcttgatacttcaaatgataaatttttaaaaaattatcctccgtacattcagagtaaagatatcgcacattatttcaactttaacgggccaaagtattcttttaattcagcttgtgcggctagtgctaatgcaatagcttatggagcagaaatgattaataatagcgatgcagatcttgttgtgacgggtggttgcgatccaatgtcagaatgggtttttgctgggtttaattcattaagaacctttaatagtaaaaattgtatgccatacggtgaggaatatggacttaacctaggagaagctgctacatacttcttattagaagataaagataaggcaattaaaaaagggcataggatatatgcggaaattttagggcacggcttatcaaatgatgcttatcatcctacagcgcctgataaggatggttcagggatatcctatgcaataaaaatggctttaaaaaactcgggtctgaagcctgaagatattttatatattaactctcacggaacaggaactaaagccaatgatagtgcagaatacagaggatttaaaactgtttttagaaatgagatgccttttattagctcaatgaaaggatacgtaggccataatctgggagcagctgctagtacagaattagctataagtttaatcggtatgaatagtcagaaagttttgtatcctaactttaatttaaccaagtatagagaagattgtaacgatgagcatatcttaaaaaagccttattcattagatggatatgaagatatcaactttataaacaataatgctgcgtttggtggacaaaatgttgctgtaattttccatgttaatttagaaggaaaatatggtcatagtgaaaagaaacttaaaacacagcaacctatatatattaataattttggcgttgcaagtgataaagcttatatgacaaagcatggtattggtattcttgacgatttacgccccttaaagaaaaaatatccaaaattatataagcgacggatgaatatgttaactcaagtaagtattatcgcggctaaacaaacattgcaggatcagtatagtaattgtgggcttgtgtatggtacgccttttggtagtctttcatcaacactaaaatatgttgattctattcaaaaatatgggtttaaaaatgctagtggggcatattttccagatttagttattaattcaacgacggggcatatttgtcaagcgctttcattgaagagttatagttcatctataagttcaggaggtgatgaagacttaagagccttaattattgcacataatgcgcttaataaagggtacgcttcaactatgttagttggagcaggccaagaagagacagaactgggcaataaagtgttgaagcgtgaagttaataatcatgcaacatttttaagccttagtaacaaaaaaatgcaagaaacaatagcagaggttctatcttccggtgcaatgggatttaaaaataaaaaagagcttttgaccattatacgatcgaaaatagatgagaagttggctaatgatgcagatctaaaagtgataattcaaaataatagtgaaattacgaacgacgaattaataagttatttcaagaatgataacaatatcagtataaattctgataattttgcggatagtaattttaaatcatttgttaatcatagaaatgaaaataggttgttgcttgttggaatttcacaagtcaatgatgtttcgtttgcagatattaaaaaaataaaatagagaaagaggtaatactgatgaagcatagtattgaagaaattaaggatattttaaaagaaaaagtattaattgaacgattagagttagatgatgtagaacccaatgatatttcagataatgaaaatttatttgatgaagaaggactagcgttagattccgtggaagcattagatatcatgacaggaattagtgaagaatttggcattgacacatcaatgttagggcaggaagatataaaccattttcaaagcgttaatgatatggctaaatatatctcagagaatgaatagaggatagttatgaaatcagtacttatcacgggaataactggaggaataggaagaaaattaactgaagcttattcttcaaagggatatcatatttatggtacgtgtagtagaaattcagactctttacaacaatttaaagagaaatggcctagtgttgaaataattcaaataaatcatgatgacttgatagatgtaagtacagaatattcctttttttttagaaaagtgcaaccagatattgttattaacaatgctggaatagtgaaagataattttttagttcaaatgtcagtgaatgattttcaagaagtgttgactactaatttgatttcggcttgggtaatagtcaaagaaatgcttttacatttaaatgataataaaattcataaaatcattaatgtagcttcaatatctggaattatagggcgtgaaggacagtgtaactatgcagcaactaagggaggattagtaggcttatgtcaattgatagaacatttagctccgaaaggcagtaatgttatttcattttcagttgcaccaggattaattgatacagatataaagggaaaaatgccaaagaaaaaaatcgataatttaaagaaggccacattggcaaataggctaggaacaccagaggaagtatcaaaatttatttttaaactatctgaagaggatatttcgtatagtgatggaactttatataggattgatggtggagttttaaaatgaagataataaataatacgattcaagtaaccgacttgcttcaatcatatggaaaagatgaaaaagacatagtaataattggtcccagcccatttaatgaattagattgccttaaagaaacaaaaataatcgataaagttcagcttaatttagaggaagttttttcatttgtaaaaaataatagcgttgctttaatgaaaaaaagaagaggaaccattgcctttttattaaatccacaaagttttgagggaggcaataatatctattctccaatctataattcagcaattaagagctttttgaaatccttatcgaaggaaatgaatccattcagagttaaagttatggggataatcttacctttaacacaagatacaaaatcgactcggaaatatgatttagttacattaaagtacaaaggaattaataatgaaaagcaggtacaagatattctaagcttacttaagctttcagaaatactaaacggacaaattgtctcgctaggcgctgaattgaatctttagtaaaggagagggaaatcattttatttctagatcaaaatgcagttataaaaatgttgccgcagaaggagccattcaggttcttagatacggttgaatgctttgatagagaaaaacgtatgattactgcattgcaacaatttggtaatgaggaattcttctttaagggtcattttccaaataatccaatagttccaggggtacttctaacagaatcgattgctcaagcaggtttgatattgatttctttattagaaggccaaaaagtgaaaattggatatctagcccaaattgaaaagacaaaatttttcaaagaggtctatcccgacgagcaagtaaaggttaaatgttcattaaagaaaaaaataggtaaatactattacattgcaggagaagtctactcgcagcaattaaataaaagatgtatgagagcaacagtaatagtatgtatttgatatggtgatggttcatgataaaaattactgaaaatatagttcaaataaaactaaagcaaggcaaaaattatccagacgttaatgtttatgtacttctaaaagaaaaagtgttaattgatataggccccaaatcaattaatacacttaaccttttaaaaaaagaattagctaggttaggattaagttttgaaacacttaatttaattattctaactcaccatcatgttgaccatgtaggacttttagagtaccttccctctgggttacgtatcgttggacctgatcatttagacttttatagttcagatatttataaaaaaagtattcaaaaattgttagttgacgataatctctctattgaatttaaaaatgatatagaaaaacaacttactactgaaataattccaagtattaatagagaaaactacgttccttttagtgagtcaaagaaaattttgcaacaatttggtcttacagctgtagagctatcaggtcattctagtgaagatattgtaattactgattcagaaaataactgttttactggtgatattattattcctaaaattttttttaactgtatatatgaggttgataaagtaaggcccaaacatcaacgttggtcatattatcatgagcttaattttttagacaggttagtaaacctagtattgccaggacatggagatattctaaagttagaagaattaaaaaaggcagttttggttaatagaaaaagaatgagacggacagagaaaaaaataataagagagttaaataaagaaacagttaatggagtggagaatgtttgtcgaagtgtattccaaagttttttgccttatagcaaattcttaccgttttcagaagtagttagtgttatcgagagtaatgatgagagaattaactattgatattatttatataaatacactaaataataacagctttgcaagtttagattctagaaaaagaatcaaaaagttacagcatcagctaggacaatatatgctttctcaaatatcttataaaaaaggttattcaatttcccatagtcatatgtgtgtagccttagcaagttatgttaatagggttggtattgatattgaacttataaataaaacaaagaaggcaaggatacagttcctttcgaaaagcgaaaaacaattagtaaatagatatggttttacaagaatatggacactaaaggaagctatagctaagtatcataccgttgggttacctcggcttaatacagttgagattaaagaaataaatgcttcgaacgttatctattttgttaataaagcaccaagaaaattgcagtataaatttttagatataatcccttcttataggttgagtgtagtggcaaaaaaggtatcaagtttttgcattagaatcacacaagaagaagatttgaaggggctaataaggagaatgtaattaatgcaaggaagagacataattctaggaatacttgaacgaaataatagaacaggatatgaaattaatgatattttgaaaaatcaattatcttatttctatgacggaacatatggaatgatatatccaacattacgaaagcttgaaaaggaaggaaaaataaaaaaggaaaaaattgtgcaaaatgataagccaaataagaatgtttattctattacagatacgggaatagaagaatttaaagaatacttggattcttctattcaagatgatatttataaatcggactttttaatgcgtctcttttttggaaactcattaccaaatcaagaaattattagagctattaaacaagagatacaacgtaaaaatgaaaagatagatcaattaactgtaaattataaaaaatggaaaaaaaatggaatgagtaaaacacaagaaataaccgtcaaatatggtattgcgcagtataccgcaattgttcagatgctgacaaaagagcttgatacgttacgaagaaatgagatggatgattaatgtcattaggaattatatttagtgggcaaggagcacaaaaatctaaaatgggtcttgatttttatgaagatccactatttgctgaattacttaaccacgcaagtaatatatctggtctaaacatgttaaaaatcttggaaaacaaaaataatgagcttacagagactgttaatttacaaccaacattaacaacattgaattatggcatatatcgaatgctgaaaagggatatttttgatatgaaagtaagctgtatggcagggctttctttaggagaatattctgcactgattgcttctaatgctttaacttttgaacagggaatacaattactagtagaccgcggaaaatatatgcaggaagcttcgaatagtaatgcaggaaaaatgttagcacttataaaacctaaactaaaagagataactcaaatttgtgctttgtgtaaggttgaaattgctaattataattctccaaagcagatagtaataggcggacaaaatttgcaaattgaatttgcaaagaaaatgattatggagcgtaaagctgcattaagaataattgagttagaagtaagtggcgcctttcatacttcgttattttcaaatgttcaaaaacaattggaaaagcgattaaaagatgttaaatttgagaatccacaaattccggtagttagtaatactacagttgaggaatttcaaaaggaaagtcttacagccgtattatcaaaacaagttgctaatcctacatattttgaaaaagatattaagttaatgaaaaatacttatggattgacacatatagttcaaattggtcctggtaaggcattaagtaattttgtgaagcaaatgtcattaggaattaagacatataatatttctaatataaaagactatagaaaatttctgaatagttatagagatattaatttgaaaggaaagaaaaatggattttgagaaaattcagcaactaattcaaatgtttgaaagctctaatacaagagaactaaaaatagatgataataactttcacatttatcttacaaaaaacgtaagtaaagaaccaattcacgatataaaatttgaatcgaataaaattcagcaagcctcagaggcaaaagcaaacaggaaaacgataacagccccattggttggaacagtttatttagcctcttctcctacgtctaaaccgtatgttcaagtagggagccatattgataaaggagatacagtgtgtgtaatagaggctatgaagctaatgacggaaataaaaagtgaggttaccggaacaattgaaaaagttaatgtagagaatggagaattagttgaagttgggcaaccgttattttcagtttctggagaaaaagaaagttaatgaaagagtgaggtgtagtgatgttttctaaagtactagttgctaatcgtggagaaatagctgttcgtattattagaactcttcatgaattgggcattaaagcggtagctatttattcgattgttgatcaagaaagtcttcatgttcaattggctgatgaagcagtttgtgtaggtggagcacgaccacaggattcgtatttaaatactactaatattttaacagcagcaattggaacaggagcacaagcgatacaccctggctttggattcctttcagaaaacgctgagtttgcaagaatgtgtgaaaaatgcggaatagtatttataggtccgcgtgctgctacgattgatttaatgggaaataaagaaaatgcgcgcgagactatgcaaaagagagggatacctgttattcctggaagtagttcctacataacaaacagttatgatgcaaaaagagttgcagataaaataggatatcctattttaataaaggcggcagctgggggtggaggtaaaggtattagaagagttgtaacgcctgagcaaatgaaacaagaatttaataatgcgcaaagagaagctcgtatatcatttggtgatgatcgtatgtaccttgaaaaaataatgtgcaatgttaaacatattgaagtacaggtagttcgtgatagattcggaaatagtgtctattttccagaacgcgattgttcactccaacgggataagcaaaaaattatagaagagagtccatgctcggttatcaattcagaacaaagaaaaattttaggaaggtatgctattaaagcaattgaagcagttgattatcttaatacaggaactattgaatttttgatggataaaaataataaattttattttatggaaatgaatactcgtattcaagttgaacatactgtaactgagatggtaacgggaatagatctagtaaaggtacaactgatgatcgcttcaggtgaggaacttcctttttcacaaaataatattaagttaaatggggtagctattgagtgtagaattaatgcagaagatcctaaaaataactttgttccttcaactggaaaaataaattatttatatttacctgtaggtaacttgggtatgagaattgatactgcactttactctggagaaaagataacaccattttatgattcaatgattgcaaaagtaatctcgcatggccatactcgcgtagaagcgatcaatagaatgaagaggttaatgcaagaactggttataaaaggtgttaaaacaaataaagatcttcacttatcaattttgggagattcaagttttttgaaagatacagtaacaactgagtatttagagaaaaactttttaccaatctggaaagagagggagaaaaatgcagctgtatgaaagtgcaacgttaactaagcaacatgtaaaggcgaatattaaagcaaatcaaaaagtacctgatgggatgttaaaaaaatgtcctaagtgtgggaaaatctttctgtctacagaatttgataagtatttttcgtgtcctggttgtaattatggatttaggattggttcatggcaaagggtagcctgggcggttgatgaattttatgaagaggatggttcacgagaactaataacctcagatcctttacattttcctaattatgtaaaaaagattcaaggacttcaaaagactactaaggtaaatgaagcagttttaacgggtaaagctaaaataaaagaccaaatttttgagtgtggcattatggatcctcactttataatgggatcattaggaacaattactggcgaaaagattacgagattatttgaacgtgctacaaaggagaggttgcctgttgtcctatggactgcttcagggggagctagaatgcaagaaggaattatgtcattaatgcagatggcaaaaataagtcaagctatagcacaacatgcatcgaaaggacttttatacattgttattttaactgatccaacaacaggtggagtaacagcaagttttgcaatgcaaggagacattattttagcagagccacatactttagtaggatttgcagggcggcgagttattgagcaaactattcatgagagaatcccagatacgttacaggatgcggagaatgtaataaaacatggattcatagatttaatagtatctcggagtgaagaaaaatctttactttataaattgttaaaatatggtaggtgataataatggcaactgagaatgcaatggcaattgtaaaagctgctcgaagtgataataaaataactgctaaagaaattatagaagaagtattttcagattttattgaattccatggtgatcgtaaaggaacagatgattcagcaattcttggaggattggcaatactttcatctacaccagtaacagtaattgcgactaataggggggaaacagttggtgaacatttgagtacacattttgggtgtccaactccaggtggctatcgtaaagctttgcgtttagcaaagcaggctgcaaagtttaatagaccaattatatttttagtaaatactcctggagcttatccagggaaaacagctgaagaacaagggcaaggatctgcgattgcgcaaaatattatccaaataagtcaacttccagttccaattattactattatttatggtgaaggtggcagtggaggtgcattagcattggcttgcggtgatcaggtgtggatgctagagaatagtacatattcaattttatcacctgagggttttgcctctattttatggaaagatggatcacgtacagaagaagccgcagaattaatgcaaatgaccccaaaagccttgctaagacataaggttattgaaggaataattccagaaagtaaagatcacaaagtaacatgtcgagcaattgctaatattttagataaacagttacaagaattaggaaaactttcagcggtagatttattgattcaacgaaaagaaagatatagaaaattttagttagtatagtaagaggagagaatacattacggtgcacgacttattatcgcttaatagaattaaagaattatataaagagaaagcaatgacaaattgcaactttttttactttaataaagtagattctactcaaaaaatagcaaaatattttttagaccatttaaatatcaataaaccatgtactatttttgctggaagtcaaacgagaggctatggtaaaagaaataggctattttattcaccacaaaattcggggatttatatgagtataattattccacaatacgaaatgcaaaatgaggatattggtttattaacaatttcattagggagtggaatactagaagttttaaagaagtattatcctaaaaaaattttttatttaaaatgggtaaatgatattctattaggcaaggtgaactactcggccataaatgaccgagcttctgggaacacgaagtagtatttaggatattacacaagtattcttgctacctaacttacagaactccgttcttttaccaaggctagttc

SEQ ID NO: 78 - protein, 561 aa, Lactobacillus reuteri
  REGION 1..561: note = Description of sequence: putative multidrug resistance protein EmrY
MTKRKNKFLIIIAMCISIFLCMLDTTVMNIALPAIQNELHVTLTNLSWALNIYTILFASLTIPLSKLAEKLGMNFLYIIGLIMFLIGSSISGISPNLAILILGRGIQSLGAAILFPLSMTIGINIVTVKTRKKVIAALGITQGLAAALGPSIGGILTQFMGWHSIFSVNIPFTILSLVICLSTFNFHEPKSNEGNDYLGSLLGIILLSALTLILTQGRSWGWKSPAINLLFFIFILTFILFLITEHYAKAPMIPLVLFKNREFTGSAVSIILSNLFLVAVTVILPTYFTHIQHRTELEAALLITPITGMIFIMSPLSAILLDKLGSRAIILSGFLLMGISYYLFTHIDMDNITLIIFTCIILGTGYGIIAGPITVLAASNFEGYLLTASQSVAGVLRQVGVSLAVAIFLTGLYGNLNTAKHNSISYINQQVNNLNIPKYQKNKIRDNSIKSLNNNSNSRTPSKHFSKKLIKETTDKEYTKQINSLPYEPSKIQEKEIYSHTKANVKLVFHRLNNSINITIKKIKTYANSQYSTAFIKLYKVSLPFLIFSCLSCLLFPKRKK

SEQ ID NO: 79 - protein, 698 aa, Lactobacillus reuteri
  REGION 1..698: note = Description of sequence: 3-oxoacyl-[acyl-carrier-protein] synthase 2
MTAVIVGIGITSSCGESFTEIEQNVGKGKTGISNIDYFDTSELTCGIAGNLSKKIWKEVLQIADKNELDWSSSLSIYTIQRLLESYNISKKQRIGLSLGTCNGGIHSLAEYLDTSNDKFLKNYPPYIQSKDIAHYFNFNGPKYSFNSACAASANAIAYGAEMINNSDADLVVTGGCDPMSEWVFAGFNSLRTFNSKNCMPYGEEYGLNLGEAATYFLLEDKDKAIKKGHRIYAEILGHGLSNDAYHPTAPDKDGSGISYAIKMALKNSGLKPEDILYINSHGTGTKANDSAEYRGFKTVFRNEMPFISSMKGYVGHNLGAAASTELAISLIGMNSQKVLYPNFNLTKYREDCNDEHILKKPYSLDGYEDINFINNNAAFGGQNVAVIFHVNLEGKYGHSEKKLKTQQPIYINNFGVASDKAYMTKHGIGILDDLRPLKKKYPKLYKRRMNMLTQVSIIAAKQTLQDQYSNCGLVYGTPFGSLSSTLKYVDSIQKYGFKNASGAYFPDLVINSTTGHICQALSLKSYSSSISSGGDEDLRALIIAHNALNKGYASTMLVGAGQEETELGNKVLKREVNNHATFLSLSNKKMQETIAEVLSSGAMGFKNKKELLTIIRSKIDEKLANDADLKVIIQNNSEITNDELISYFKNDNNISINSDNFADSNFKSFVNHRNENRLLLVGISQVNDVSFADIKKIK

SEQ ID NO: 80 - protein, 90 aa, Lactobacillus reuteri
  REGION 1..90: note = Description of sequence: acyl carrier protein
MKHSIEEIKDILKEKVLIERLELDDVEPNDISDNENLFDEEGLALDSVEALDIMTGISEEFGIDTSMLGQEDINHFQSVNDMAKYISENE

SEQ ID NO: 81 - protein, 239 aa, Lactobacillus reuteri
  REGION 1..239: note = Description of sequence: 3-oxoacyl-[acyl-carrier-protein] reductase FabG
MKSVLITGITGGIGRKLTEAYSSKGYHIYGTCSRNSDSLQQFKEKWPSVEIIQINHDDLIDVSTEYSFFFRKVQPDIVINNAGIVKDNFLVQMSVNDFQEVLTTNLISAWVIVKEMLLHLNDNKIHKIINVASISGIIGREGQCNYAATKGGLVGLCQLIEHLAPKGSNVISFSVAPGLIDTDIKGKMPKKKIDNLKKATLANRLGTPEEVSKFIFKLSEEDISYSDGTLYRIDGGVLK

SEQ ID NO: 82 - protein, 174 aa, Lactobacillus reuteri
  REGION 1..174: note = Description of sequence: hypothetical protein
MKIINNTIQVTDLLQSYGKDEKDIVIIGPSPFNELDCLKETKIIDKVQLNLEEVFSFVKNNSVALMKKRRGTIAFLLNPQSFEGGNNIYSPIYNSAIKSFLKSLSKEMNPFRVKVMGIILPLTQDTKSTRKYDLVTLKYKGINNEKQVQDILSLLKLSEILNGQIVSLGAELNL

SEQ ID NO: 83 - protein, 111 aa, Lactobacillus reuteri
  REGION 1..111: note = Description of sequence: 3-hydroxyacyl-[acyl-carrier-protein] dehydratase FabZ
MITALQQFGNEEFFFKGHFPNNPIVPGVLLTESIAQAGLILISLLEGQKVKIGYLAQIEKTKFFKEVYPDEQVKVKCSLKKKIGKYYYIAGEVYSQQLNKRCMRATVIVCI

SEQ ID NO: 84 - protein, 298 aa, Lactobacillus reuteri
  REGION 1..298: note = Description of sequence: Metallo-beta-lactamase superfamily protein
MIKITENIVQIKLKQGKNYPDVNVYVLLKEKVLIDIGPKSINTLNLLKKELARLGLSFETLNLIILTHHHVDHVGLLEYLPSGLRIVGPDHLDFYSSDIYKKSIQKLLVDDNLSIEFKNDIEKQLTTEIIPSINRENYVPFSESKKILQQFGLTAVELSGHSSEDIVITDSENNCFTGDIIIPKIFFNCIYEVDKVRPKHQRWSYYHELNFLDRLVNLVLPGHGDILKLEELKKAVLVNRKRMRRTEKKIIRELNKETVNGVENVCRSVFQSFLPYSKFLPFSEVVSVIESNDERINY

SEQ ID NO: 85 - protein, 183 aa, Lactobacillus reuteri
  REGION 1..183: note = Description of sequence: hypothetical protein
MRELTIDIIYINTLNNNSFASLDSRKRIKKLQHQLGQYMLSQISYKKGYSISHSHMCVALASYVNRVGIDIELINKTKKARIQFLSKSEKQLVNRYGFTRIWTLKEAIAKYHTVGLPRLNTVEIKEINASNVIYFVNKAPRKLQYKFLDIIPSYRLSVVAKKVSSFCIRITQEEDLKGLIRRM

SEQ ID NO: 86 - protein, 177 aa, Lactobacillus reuteri
  REGION 1..177: note = Description of sequence: Transcriptional regulator PadR-like family protein
MQGRDIILGILERNNRTGYEINDILKNQLSYFYDGTYGMIYPTLRKLEKEGKIKKEKIVQNDKPNKNVYSITDTGIEEFKEYLDSSIQDDIYKSDFLMRLFFGNSLPNQEIIRAIKQEIQRKNEKIDQLTVNYKKWKKNGMSKTQEITVKYGIAQYTAIVQMLTKELDTLRRNEMDD

SEQ ID NO: 87 - protein, 317 aa, Lactobacillus reuteri
  REGION 1..317: note = Description of sequence: Polyketide biosynthesis malonyl CoA-acyl carrier protein transacylase BaeC
MSLGIIFSGQGAQKSKMGLDFYEDPLFAELLNHASNISGLNMLKILENKNNELTETVNLQPTLTTLNYGIYRMLKRDIFDMKVSCMAGLSLGEYSALIASNALTFEQGIQLLVDRGKYMQEASNSNAGKMLALIKPKLKEITQICALCKVEIANYNSPKQIVIGGQNLQIEFAKKMIMERKAALRIIELEVSGAFHTSLFSNVQKQLEKRLKDVKFENPQIPVVSNTTVEEFQKESLTAVLSKQVANPTYFEKDIKLMKNTYGLTHIVQIGPGKALSNFVKQMSLGIKTYNISNIKDYRKFLNSYRDINLKGKKNGF

SEQ ID NO: 88 - protein, 142 aa, Lactobacillus reuteri
  REGION 1..142: note = Description of sequence: Biotin carboxyl carrier protein of acetyl-CoA carboxylase
MDFEKIQQLIQMFESSNTRELKIDDNNFHIYLTKNVSKEPIHDIKFESNKIQQASEAKANRKTITAPLVGTVYLASSPTSKPYVQVGSHIDKGDTVCVIEAMKLMTEIKSEVTGTIEKVNVENGELVEVGQPLFSVSGEKES

SEQ ID NO: 89 - protein, 459 aa, Lactobacillus reuteri
  REGION 1..459: note = Description of sequence: 2-oxoglutarate carboxylase small subunit
MFSKVLVANRGEIAVRIIRTLHELGIKAVAIYSIVDQESLHVQLADEAVCVGGARPQDSYLNTTNILTAAIGTGAQAIHPGFGFLSENAEFARMCEKCGIVFIGPRAATIDLMGNKENARETMQKRGIPVIPGSSSYITNSYDAKRVADKIGYPILIKAAAGGGGKGIRRVVTPEQMKQEFNNAQREARISFGDDRMYLEKIMCNVKHIEVQVVRDRFGNSVYFPERDCSLQRDKQKIIEESPCSVINSEQRKILGRYAIKAIEAVDYLNTGTIEFLMDKNNKFYFMEMNTRIQVEHTVTEMVTGIDLVKVQLMIASGEELPFSQNNIKLNGVAIECRINAEDPKNNFVPSTGKINYLYLPVGNLGMRIDTALYSGEKITPFYDSMIAKVISHGHTRVEAINRMKRLMQELVIKGVKTNKDLHLSILGDSSFLKDTVTTEYLEKNFLPIWKEREKNAAV

SEQ ID NO: 90 - protein, 279 aa, Lactobacillus reuteri
  REGION 1..279: note = Description of sequence: Acetyl-coenzyme A carboxylase carboxyl transferase subunit beta
MQLYESATLTKQHVKANIKANQKVPDGMLKKCPKCGKIFLSTEFDKYFSCPGCNYGFRIGSWQRVAWAVDEFYEEDGSRELITSDPLHFPNYVKKIQGLQKTTKVNEAVLTGKAKIKDQIFECGIMDPHFIMGSLGTITGEKITRLFERATKERLPVVLWTASGGARMQEGIMSLMQMAKISQAIAQHASKGLLYIVILTDPTTGGVTASFAMQGDIILAEPHTLVGFAGRRVIEQTIHERIPDTLQDAENVIKHGFIDLIVSRSEEKSLLYKLLKYGR

SEQ ID NO: 91 - protein, 251 aa, Lactobacillus reuteri
  REGION 1..251: note = Description of sequence: Acetyl-coenzyme A carboxylase carboxyl transferase subunit alpha
MAIVKAARSDNKITAKEIIEEVFSDFIEFHGDRKGTDDSAILGGLAILSSTPVTVIATNRGETVGEHLSTHFGCPTPGGYRKALRLAKQAAKFNRPIIFLVNTPGAYPGKTAEEQGQGSAIAQNIIQISQLPVPIITIIYGEGGSGGALALACGDQVWMLENSTYSILSPEGFASILWKDGSRTEEAAELMQMTPKALLRHKVIEGIIPESKDHKVTCRAIANILDKQLQELGKLSAVDLLIQRKERYRKF

SEQ ID NO: 92 - protein, 143 aa, Lactobacillus reuteri
  REGION 1..143: note = Description of sequence: bifunctional biotin--[acetyl-CoA-carboxylase] synthetase/biotin operon repressor
MHDLLSLNRIKELYKEKAMTNCNFFYFNKVDSTQKIAKYFLDHLNINKPCTIFAGSQTRGYGKRNRLFYSPQNSGIYMSIIIPQYEMQNEDIGLLTISLGSGILEVLKKYYPKKIFYLKWVNDILLGKVNYSAINDRASGNTK
